(19) United States
(12) Patent Application Publication
(10) Pub. No.: US 2026/0085331 A1
(43) Pub. Date: Mar. 26, 2026

(54) Biallelic Knockout of PDCD1

(71) Applicant: EmendoBio Inc., Wimington, DE (US)

(72) Inventor: Rafi EMMANUEL, Ramla (IL)

(21) Appl. No.: 19/113,031

(22) PCT Filed: Sep. 18, 2023
(86) PCT No.: PCT/US2023/074489

§ 371 Date: Mar. 19, 2025

Related U.S. Application Data
(60) Provisional application No. 63/376,276, filed on Sep. 19, 2022.

(51) Int. Cl. C12N 15/90; C12N 9/22; C12N 15/11

(52) U.S. Cl. CPC C12N 15/907; C12N 9/226; C12N 15/11; C12N 2310/20; C12N 2800/80

(57) ABSTRACT

Compositions comprising an RNA molecule comprising a guide sequence portion having 17-50 contiguous nucleotides containing nucleotides in the sequence set forth in any one of SEQ ID NOs: 1-6220 and methods and uses thereof.

[0001] This application is a Section 371 national stage of PCT International Application No. PCT/US2023/074489, filed Sep. 18, 2023, and claims the benefit of U.S. Provisional Application No. 63/376,276 filed Sep. 19, 2022, the content of which is hereby incorporated by reference.

[0002] Throughout this application, various publications are referenced, including referenced in parenthesis. The disclosures of all publications mentioned in this application in their entireties are hereby incorporated by reference into this application in order to provide additional description of the art to which this invention pertains and of the features in the art which can be employed with this invention.

### REFERENCE TO SEQUENCE LISTING

[0003] This application incorporates-by-reference nucleotide sequences which are present in the file named “230918_92043-A-PCT_Sequence_Listing_AWG.xml”, which is 5,383 kilobytes in size, and which was created on Sep. 18, 2023 in the IBM-PC machine format, having an operating system compatibility with MS-Windows, which is contained in the XML file filed Mar. 19, 2025 as part of this application.

### BACKGROUND OF INVENTION

[0004] Chimeric antigen receptors (CAR) provide a promising approach for immunotherapy. However, to make such therapies (e.g., CAR-T cell therapies) more accessible, it is highly desirable to develop an allogeneic adoptive transfer strategy in which universal CAR cells derived from cells of healthy donors can be applied to treat multiple patients. In order to implement such a strategy, the immunogenicity and reactivity of CAR-T cells must be optimized to avoid harmful reactions, such as rejection by the host or graft-versus-host-disease.

### SUMMARY OF THE INVENTION

[0005] PDCD1 is an immune-inhibitory receptor expressed in T cells and is involved in the regulation and inhibition of T cell functions. Disclosed are approaches for knocking out the PDCD1 gene in cells to be utilized for immunotherapy approaches, such as CAR-T therapy. A cell modified to have a PDCD1 knockout improves performance of the cell in allogeneic adoptive transfer therapy. Such cells have improved activity, retention, and/or expansion qualities for use in adoptive cancer immunotherapy.

[0006] The present disclosure also provides a method for inactivating alleles of the Programmed cell death protein 1 (PDCD1) gene in a cell, the method comprising
[0007] introducing to the cell a composition comprising:
   [0008] a CRISPR nuclease, or a polynucleotide molecule encoding the CRISPR nuclease; and
   [0009] an RNA molecule comprising a guide sequence portion having 17-50 nucleotides, or a polynucleotide molecule encoding the RNA molecule,
[0010] wherein a complex of the CRISPR nuclease and the RNA molecule affects a double strand break in the allele of the PDCD1 gene.

[0011] In some embodiments, the RNA molecule comprises a guide sequence portion that targets a sequence that is located within any one of Exons 1-5 of the PDCD1 gene, or a sequence that is located within a genomic range selected from any one of 2:241858724-241858876, 2:241852582-241853018, 2:241852159-241852391, 2:241851910-241852021, and 2:241851019-241851335. In some embodiments, the guide sequence portion of the RNA molecule comprises 17-50 contiguous nucleotides containing nucleotides in the sequence set forth in any one of SEQ ID NOs: 1-6220.

[0012] According to embodiments of the present invention, there is provided an RNA molecule comprising a guide sequence portion having 17-50 contiguous nucleotides containing nucleotides in the sequence set forth in any one of SEQ ID Nos: 1-6220.

[0013] According to embodiments of the present invention, there is provided a composition comprising an RNA molecule comprising a guide sequence portion having 17-50 contiguous nucleotides containing nucleotides in the sequence set forth in any one of SEQ ID NOs: 1-6220 and a CRISPR nuclease.

[0014] According to embodiments of the present invention, there is provided a method for inactivating a PDCD1 allele in a cell, the method comprising delivering to the cell a composition comprising an RNA molecule comprising a guide sequence portion having 17-50 contiguous nucleotides containing nucleotides in the sequence set forth in any one of SEQ ID NOs: 1-6220 and a CRISPR nuclease. In some embodiments, the cell is a lymphocyte. In some embodiments, the cell is a T cell. In some embodiments, the cell is a T regulatory cell. In some embodiments, the cell is a B cell. In some embodiments, the cell is a natural killer (NK) cell. In some embodiments, the cell is a macrophage. In some embodiments, the cell is a stem cell. In some embodiments, the cell is an iPSC. In some embodiments, the cell is a fibroblast, blood cell, hepatocyte, keratinocyte, or any other cell type capable of being reprogrammed to an induced pluripotent stem cell (iPSC). In some embodiments, the delivering to the cell is performed in vivo, ex vivo, or in vitro. In some embodiments, the method is performed ex vivo and the cell is provided/explanted from an individual patient. In some embodiments, the method further comprises the step of introducing the resulting cell, with the modified/knocked out PDCD1 allele, into an individual patient. In some embodiments, the cell is originated from the individual patient to be treated. In some embodiments, the cell is originated from a donor. In some embodiments, the cell is allogeneic to the individual patient to which it is introduced.

[0015] According to embodiments of the present invention, there is provided a method for improving the activity and/or retention and/or expansion of a cell for adoptive cell therapy, the method comprising delivering to a cell of a subject in need of the adoptive cell therapy a composition comprising an RNA molecule comprising a guide sequence portion having 17-50 contiguous nucleotides containing nucleotides in the sequence set forth in any one of SEQ ID NOs: 1-6220 and a CRISPR nuclease. In some embodiments, the method is for increasing persistence and/or engraftment of a cell in a host subject, the method comprising delivering to the cell a composition comprising an RNA molecule comprising a guide sequence portion having 17-50 contiguous nucleotides containing nucleotides in the sequence set forth in any one of SEQ ID NOs: 1-6220 and a CRISPR nuclease; and introducing the cell to the host subject. In some embodiments, the cell is further differentiated prior to introducing the cell to the host subject. In some embodiments, the cell is further engineered to express a chimeric antigen receptor. In some embodiments, the cell is a stem cell, an iPSC, or a progenitor cell and is differentiated to a T cell prior to introducing the cell to the host subject. In some embodiments, the cell is a T cell. In some embodiments, the cell is further engineered to have additional genes inactivated and/or knocked-out in order to improve the use of the cell for adoptive transfer, e.g. knockout of additional genes to avoid graft-versus-host disease (GVHD) following introduction of the cell into a host subject.

[0016] According to embodiments of the present invention, there is provided use of a composition comprising an RNA molecule comprising a guide sequence portion having 17-50 contiguous nucleotides containing nucleotides in the sequence set forth in any one of SEQ ID NOs: 1-6220 and a CRISPR nuclease for inactivating a PDCD1 allele in a cell, comprising delivering to the cell the composition comprising an RNA molecule comprising a guide sequence portion having 17-50 contiguous nucleotides containing nucleotides in the sequence set forth in any one of SEQ ID NOs: 1-6220 and a CRISPR nuclease.

[0017] According to embodiments of the present invention, there is provided a medicament comprising an RNA molecule comprising a guide sequence portion having 17-50 contiguous nucleotides containing nucleotides in the sequence set forth in any one of SEQ ID NOs: 1-6220 and a CRISPR nuclease for use in inactivating a PDCD1 allele in a cell, wherein the medicament is administered by delivering to the cell the composition comprising an RNA molecule comprising a guide sequence portion having 17-50 contiguous nucleotides containing nucleotides in the sequence set forth in any one of SEQ ID NOs: 1-6220 and a CRISPR nuclease.

[0018] According to embodiments of the present invention, there is provided use of a composition comprising an RNA molecule comprising a guide sequence portion having 17-50 contiguous nucleotides containing nucleotides in the sequence set forth in any one of SEQ ID NOs: 1-6220 and a CRISPR nuclease for improving the activity and/or retention and/or expansion of a cell for adoptive cell therapy or increasing persistence of the cell upon engraftment, comprising delivering to a cell of a subject in need of the adoptive cell therapy the composition of comprising an RNA molecule comprising a guide sequence portion having 17-50 contiguous nucleotides containing nucleotides in the sequence set forth in any one of SEQ ID NOs: 1-6220 and a CRISPR nuclease.

[0019] According to embodiments of the present invention, there is provided a method of treating a disease or disorder, the method comprising delivering any one of the compositions or the modified cells described herein to the subject, preferably wherein the disease or disorder is cancer.

[0020] According to embodiments of the present invention, there is provided a kit for inactivating a PDCD1 allele in a cell, comprising an RNA molecule comprising a guide sequence portion having 17-50 contiguous nucleotides containing nucleotides in the sequence set forth in any one of SEQ ID NOs: 1-6220, a CRISPR nuclease, and optionally a tracrRNA molecule; and instructions for delivering the RNA molecule, CRISPR nuclease, and optionally the tracrRNA to the cell.

### BRIEF DESCRIPTION OF THE DRAWINGS

[0021] FIG. 1: PDCD1 editing in HeLa cells. OMNI-103 CRISPR nuclease was expressed in a mammalian cell system (HeLa cells) by DNA transfection, together with an sgRNA-expressing plasmid. Transfection efficiency (% transfection) was determined by flow cytometry measurement of mCherry signal. All tests were done in triplicate. ‘OMNI nuclease only’ (i.e. no guide) transfected cells served as a negative control, and no editing was observed in those cells (data not shown).

[0022] FIG. 2: PDCD1 editing in primary T cells. T cells obtained from a donor were thawed and activated with beads for 72 h. Then, a cleavage activity assay was performed with OMNI-103 CRISPR nuclease (113 pmol)+sgRNA (226 pmol) and 2×10⁶ cells per treatment. After seven (7) days, ˜100,000 cells were sorted by FACS and sent for next-generation sequencing (NGS) analysis. Robotic PCR on DNA lysate from Quick Extract was used to prepare NGS samples. *NT cells show ˜33.6% PD1 expression. PDCD1_S98 shows 61% editing after normalization to NT cells (=100−((13.1/33.6)*100). **The Freq. of Parent and the geometric mean were presented in the PDCD1 positive.

### DETAILED DESCRIPTION

[0023] Unless otherwise defined, all technical and/or scientific terms used herein have the same meaning as commonly understood by one of ordinary skill in the art to which the invention pertains. Although methods and materials similar or equivalent to those described herein can be used in the practice or testing of embodiments of the invention, exemplary methods and/or materials are described below. In case of conflict, the patent specification, including definitions, will control. In addition, the materials, methods, and examples are illustrative only and are not intended to be necessarily limiting.

[0024] It should be understood that the terms “a” and “an” as used above and elsewhere herein refer to “one or more” of the enumerated components. It will be clear to one of ordinary skill in the art that the use of the singular includes the plural unless specifically stated otherwise. Therefore, the terms “a,” “an” and “at least one” are used interchangeably in this application.

[0025] For purposes of better understanding the present teachings and in no way limiting the scope of the teachings, unless otherwise indicated, all numbers expressing quantities, percentages or proportions, and other numerical values used in the specification and claims, are to be understood as being modified in all instances by the term “about.” Accordingly, unless indicated to the contrary, the numerical parameters set forth in the following specification and attached claims are approximations that may vary depending upon the desired properties sought to be obtained. At the very least, each numerical parameter should at least be construed in light of the number of reported significant digits and by applying ordinary rounding techniques.

[0026] Unless otherwise stated, adjectives such as “substantially” and “about” modifying a condition or relationship characteristic of a feature or features of an embodiment of the invention, are understood to mean that the condition or characteristic is defined to within tolerances that are acceptable for operation of the embodiment for an application for which it is intended. Unless otherwise indicated, the word “or” in the specification and claims is considered to be the inclusive “or” rather than the exclusive or, and indicates at least one of, or any combination of items it conjoins.

[0027] In the description and claims of the present application, each of the verbs, “comprise,” “include” and “have” and conjugates thereof, are used to indicate that the object or objects of the verb are not necessarily a complete listing of components, elements or parts of the subject or subjects of the verb. Other terms as used herein are meant to be defined by their well-known meanings in the art.

[0028] In some embodiments of the present invention, a DNA nuclease is utilized to affect a DNA break at a target site to induce cellular repair mechanisms, for example, but not limited to, non-homologous end-joining (NHEJ). During classical NHEJ, two ends of a double-strand break (DSB) site are ligated together in a fast but also inaccurate manner (i.e. frequently resulting in mutation of the DNA at the cleavage site in the form of small insertion or deletions).

[0029] As used herein, the term “modified cells” refers to cells in which a double strand break is affected by a complex of an RNA molecule and the CRISPR nuclease as a result of hybridization with the target sequence, i.e. on-target hybridization.

[0030] This invention provides a modified cell or cells obtained by use of any of the methods described herein. In an embodiment these modified cell or cells are capable of giving rise to progeny cells. In an embodiment these modified cell or cells are capable of giving rise to progeny cells after engraftment. As a non-limiting example, the modified cells may be hematopoietic stem cells (HSCs), or any cell suitable for an allogenic cell transplant or autologous cell transplant.

[0031] As used herein, the term “targeting sequence” or “targeting molecule” refers a nucleotide sequence or molecule comprising a nucleotide sequence that is capable of hybridizing to a specific target sequence, e.g., the targeting sequence has a nucleotide sequence which is at least partially complementary to the sequence being targeted along the length of the targeting sequence. The targeting sequence or targeting molecule may be part of an RNA molecule that can form a complex with a CRISPR nuclease, either alone or in combination with other RNA molecules, with the targeting sequence serving as the targeting portion of the CRISPR complex. When the molecule having the targeting sequence is present contemporaneously with the CRISPR nuclease, the RNA molecule, alone or in combination with an additional one or more RNA molecules (e.g. a tracrRNA molecule), is capable of targeting the CRISPR nuclease to the specific target sequence. As non-limiting example, a guide sequence portion of a CRISPR RNA molecule or single-guide RNA molecule may serve as a targeting molecule. Each possibility represents a separate embodiment. A targeting sequence can be custom designed to target any desired sequence.

[0032] The term “targets” as used herein, refers to preferentially hybridizing a targeting sequence of a targeting molecule to a nucleic acid having a targeted nucleotide sequence. It is understood that the term “targets” encompasses variable hybridization efficiencies, such that there is preferential targeting of the nucleic acid having the targeted nucleotide sequence, but unintentional off-target hybridization in addition to on-target hybridization might also occur. It is understood that where an RNA molecule targets a sequence, a complex of the RNA molecule and a CRISPR nuclease molecule targets the sequence for nuclease activity.

[0033] The “guide sequence portion” of an RNA molecule refers to a nucleotide sequence that is capable of hybridizing to a specific target DNA sequence, e.g., the guide sequence portion has a nucleotide sequence which is partially or fully complementary to the DNA sequence being targeted along the length of the guide sequence portion. In some embodiments, the guide sequence portion is 17, 18, 19, 20, 21, 22, 23, 24, 25, 26, 27, 28, 29, 30, 31, 32, 33, 34, 35, 36, 37, 38, 39, 40, 41, 42, 43, 44, 45, 46, 47, 48, 49 or 50 nucleotides in length, or approximately 17-50, 17-49, 17-48, 17-47, 17-46, 17-45, 17-44, 17-43, 17-42, 17-41, 17-40, 17-39, 17-38, 17-37, 17-36, 17-35, 17-34, 17-33, 17-31, 17-50, 17-29, 17-28, 17-27, 17-26, 17-25, 17-24, 17-22, 17-21, 18-25, 18-24, 18-23, 18-22, 18-21, 19-25, 19-24, 19-23, 19-22, 19-21, 19-20, 20-22, 18-20, 20-21, 21-22, or 17-20 nucleotides in length. Preferably, the entire length of the guide sequence portion is fully complementary to the DNA sequence being targeted along the length of the guide sequence portion. The guide sequence portion may be part of an RNA molecule that can form a complex with a CRISPR nuclease with the guide sequence portion serving as the DNA targeting portion of the CRISPR complex. When the RNA molecule having the guide sequence portion is present contemporaneously with the CRISPR molecule, alone or in combination with an additional one or more RNA molecules (e.g. a tracrRNA molecule), the RNA molecule is capable of targeting the CRISPR nuclease to the specific target DNA sequence. Accordingly, a CRISPR complex can be formed by direct binding of the RNA molecule having the guide sequence portion to a CRISPR nuclease or by binding of the RNA molecule having the guide sequence portion and an additional one or more RNA molecules to the CRISPR nuclease. Each possibility represents a separate embodiment. A guide sequence portion can be custom designed to target any desired sequence. Accordingly, a molecule comprising a “guide sequence portion” is a type of targeting molecule. In some embodiments, the guide sequence portion comprises a sequence that is the same as, or differs by no more than 1, 2, 3, 4, or 5 nucleotides from, a guide sequence portion described herein, e.g., a guide sequence set forth in any of SEQ ID NOs: 1-6220. Each possibility represents a separate embodiment. In some of these embodiments, the guide sequence portion comprises a sequence that is the same as a sequence set forth in any of SEQ ID NOs: 1-6220. Throughout this application, the terms “guide molecule,” “RNA guide molecule,” “guide RNA molecule,” and “gRNA molecule” are synonymous with a molecule comprising a guide sequence portion.

[0034] The term “non-discriminatory” as used herein refers to a guide sequence portion of an RNA molecule that targets a specific DNA sequence that is common to all alleles of a gene.

[0035] In embodiments of the present invention, an RNA molecule comprises a guide sequence portion having 17-50 contiguous nucleotides containing nucleotides in the sequence set forth in any one of SEQ ID NOs: 1-6220.

[0036] The RNA molecule and/or the guide sequence portion of the RNA molecule may contain modified nucleotides. Exemplary modifications to nucleotides/polynucleotides may be synthetic and encompass polynucleotides which contain nucleotides comprising bases other than the naturally occurring adenine, cytosine, thymine, uracil, or guanine bases. Modifications to polynucleotides include polynucleotides which contain synthetic, non-naturally occurring nucleosides e.g., locked nucleic acids. Modifications to polynucleotides may be utilized to increase or decrease stability of an RNA. An example of a modified polynucleotide is an mRNA containing 1-methyl pseudo-uridine. For examples of modified polynucleotides and their uses, see U.S. Pat. No. 8,278,036, PCT International Publication No. WO/2015/006747, and Weissman and Kariko (2015), each of which is hereby incorporated by reference.

[0037] As used herein, “contiguous nucleotides” set forth in a SEQ ID NO refers to nucleotides in a sequence of nucleotides in the order set forth in the SEQ ID NO without any intervening nucleotides.

[0038] In embodiments of the present invention, the guide sequence portion may be 17-50 nucleotides in length and contain 20-22 contiguous nucleotides in the sequence set forth in any one of SEQ ID NOs: 1-6220. In embodiments of the present invention, the guide sequence portion may be less than 22 nucleotides in length. For example, in embodiments of the present invention the guide sequence portion may be 17, 18, 19, 20, or 21 nucleotides in length. In such embodiments the guide sequence portion may consist of 17, 18, 19, 20, or 21 nucleotides, respectively, in the sequence of 17-22 contiguous nucleotides set forth in any one of SEQ ID NOs: 1-6220. For example, a guide sequence portion having 17 nucleotides in the sequence of 17 contiguous nucleotides set forth in SEQ ID NO: 6216 may consist of any one of the following nucleotide sequences (nucleotides excluded from the contiguous sequence are marked in strike-through):

(SEQ ID NO: 6216)
AAAAAAAUGUACUUGGUUCC
17 nucleotide guide sequence 1:
(SEQ ID NO: 6217) [symbol]
AAAAUGUACUUGGUUCC
17 nucleotide guide sequence 2:
(SEQ ID NO: 6218)
AAAAAAUGUACUUGGUU [symbol]
17 nucleotide guide sequence 3:
(SEQ ID NO: 6219) [symbol]
AAAAAAUGUACUUGGUU [symbol]
17 nucleotide guide sequence 4:
(SEQ ID NO: 6220)
AAAAAAAUGUACUUGGU

[symbol]

[0039] In embodiments of the present invention, the guide sequence portion may be greater than 20 nucleotides in length. For example, in embodiments of the present invention the guide sequence portion may be 21, 22, 23, 24, 25, 26, 27, 28, 29, or 30 nucleotides in length. In such embodiments the guide sequence portion comprises 17-50 nucleotides containing the sequence of 20, 21 or 22 contiguous nucleotides set forth in any one of SEQ ID NOs: 1-6220 and additional nucleotides fully complimentary to a nucleotide or sequence of nucleotides adjacent to the 3′ end of the target sequence, 5′ end of the target sequence, or both.

[0040] In embodiments of the present invention a CRISPR nuclease and an RNA molecule comprising a guide sequence portion form a CRISPR complex that binds to a target DNA sequence to effect cleavage of the target DNA sequence. CRISPR nucleases, e.g. Cpf1, may form a CRISPR complex comprising a CRISPR nuclease and RNA molecule without a further tracrRNA molecule. Alternatively, CRISPR nucleases, e.g. Cas9, may form a CRISPR complex between the CRISPR nuclease, an RNA molecule, and a tracrRNA molecule. A guide sequence portion, which comprises a nucleotide sequence that is capable of hybridizing to a specific target DNA sequence, and a sequence portion that participates in CRISPR nuclease binding, e.g. a tracrRNA sequence portion, can be located on the same RNA molecule. Alternatively, a guide sequence portion may be located on one RNA molecule and a sequence portion that participates in CRISPR nuclease binding, e.g. a tracrRNA portion, may located on a separate RNA molecule. A single RNA molecule comprising a guide sequence portion (e.g. a DNA-targeting RNA sequence) and at least one CRISPR protein-binding RNA sequence portion (e.g. a tracrRNA sequence portion), can form a complex with a CRISPR nuclease and serve as the DNA-targeting molecule. In some embodiments, a first RNA molecule (e.g. a crRNA molecule) comprising a DNA-targeting RNA portion, which includes a guide sequence portion, and a separate RNA molecule (e.g. a tracrRNA molecule) comprising a CRISPR protein-binding RNA sequence interact by base pairing to form an RNA complex (e.g. a crRNA:tracrRNA complex) that targets the CRISPR nuclease to a DNA target site or, alternatively, are fused together to form an RNA molecule (e.g. a sgRNA molecule) that complexes with the CRISPR nuclease and targets the CRISPR nuclease to a DNA target site.

[0041] In embodiments of the present invention, an RNA molecule comprising a guide sequence portion may further comprise the sequence of a tracrRNA molecule. Such embodiments may be designed as a synthetic fusion of the guide portion of the RNA molecule and the trans-activating crRNA (tracrRNA). (See Jinek et al., 2012). In such an embodiment, the RNA molecule is a single guide RNA (sgRNA) molecule. Embodiments of the present invention may also form CRISPR complexes utilizing a separate tracrRNA molecule and a separate RNA molecule comprising a guide sequence portion (e.g. a crRNA molecule). In such embodiments the tracrRNA molecule may hybridize with the RNA molecule via basepairing and may be advantageous in certain applications of the invention described herein.

[0042] The term “tracr mate sequence” refers to a sequence sufficiently complementary to a tracrRNA molecule so as to hybridize to the tracrRNA via basepairing and promote the formation of a CRISPR complex. (See U.S. Pat. No. 8,906,616). In embodiments of the present invention, the RNA molecule may further comprise a portion having a tracr mate sequence.

[0043] A “gene,” for the purposes of the present disclosure, includes a DNA region encoding a gene product, as well as all DNA regions which regulate the production of the gene product, whether or not such regulatory sequences are adjacent to coding and/or transcribed sequences. Accordingly, a gene includes, but is not necessarily limited to, promoter sequences, terminators, translational regulatory sequences such as ribosome binding sites and internal ribosome entry sites, enhancers, silencers, insulators, boundary elements, replication origins, matrix attachment sites and locus control regions.

[0044] “Eukaryotic” cells include, but are not limited to, fungal cells (such as yeast), plant cells, animal cells, mammalian cells and human cells.

[0045] The term “nuclease” as used herein refers to an enzyme capable of cleaving the phosphodiester bonds between the nucleotide subunits of nucleic acid. A nuclease may be isolated or derived from a natural source. The natural source may be any living organism. Alternatively, a nuclease may be a modified or a synthetic protein which retains the phosphodiester bond cleaving activity. Gene modification can be achieved using a nuclease, for example a CRISPR nuclease.

[0046] According to embodiments of the present invention, there is provided a method for inactivating alleles of the Programmed cell death protein 1 (PDCD1) gene in a cell, the method comprising
[0047] introducing to the cell a composition comprising:
   [0048] at least one CRISPR nuclease, or a polynucleotide molecule encoding a CRISPR nuclease; and
   [0049] an RNA molecule comprising a guide sequence portion, or a polynucleotide molecule encoding the same,
[0050] wherein a complex of the CRISPR nuclease and the RNA molecule affects a double strand break in alleles of the PDCD1 gene, and
[0051] wherein the guide sequence portion of the RNA molecule comprises 17-50 contiguous nucleotides containing nucleotides in the sequence set forth in any one of SEQ ID NOs: 1-6220.

[0052] In some embodiments, the guide sequence portion contains a sequence of nucleotides as listed in SEQ ID NOs: 1-6220, or a portion of any one of SEQ ID NOs: 1-6220, and optionally contains additional nucleotides prepended or appended to the beginning or end of the sequence of nucleotides. As a non-limiting example, a 17-nucleotide sequence found within SEQ ID NO: 1 may form a guide sequence portion. Additionally, a guide sequence portion may comprise a 17-nucleotide sequence found within SEQ ID NO: 1 and further include additional nucleotides 5′ or 3′ of the 17-nucleotide sequence found within SEQ ID NO: 1.

[0053] In some embodiments, the RNA molecule is a crRNA molecule and the composition further comprises a tracrRNA molecule that forms a crRNA:tracrRNA complex with the crRNA molecule. In some embodiments, the RNA molecule is an sgRNA molecule.

[0054] In some embodiments, the composition comprises additional RNA molecules comprising a guide sequence portion comprising 17-50 contiguous nucleotides containing nucleotides in the sequence set forth in any one of SEQ ID NOs: 1-6220.

[0055] In some embodiments, the guide sequence portion of the RNA molecule comprises 17-50 contiguous nucleotides containing nucleotides in the sequence set forth in any one of SEQ ID NOs: 1-6220 modified to comprise up to five mismatches relative to the target site.

[0056] In some embodiments, the method is a method of preparing modified immune cells (e.g., T cells) for use in immunotherapy. In some embodiments, the method is performed in vitro or ex vivo.

[0057] In some embodiments, the composition is introduced to a cell in a subject or to a cell in culture.

[0058] In some embodiments, the cell is a lymphocyte, a T cell, a T regulatory cell, a B cell, a natural killer (NK) cell, a macrophage, a stem cell, or a fibroblast, blood cell, hepatocyte, keratinocyte, or any other cell type capable of being reprogrammed to an induced pluripotent stem cell (iPSC).

[0059] In some embodiments, the cell is a hematopoietic stem cell (HSC), induced pluripotent stem cell (iPS cell), iPSc-derived cell, natural killer cell (NK), iPS-derived NK cell (iNK), T cell, innate-like T cell (iT), natural killer T cell (NKT), γδ T cell, iPSc-derived T cell, invariant NKT cells (iNKT), iPSc-derived NKT, monocyte, or macrophage.

[0060] In some embodiments, the CRISPR nuclease and the RNA molecule are introduced to the cell at substantially the same time or at different times.

[0061] In some embodiments, alleles of the PDCD1 gene in the cell are subjected to an insertion or deletion mutation.

[0062] In some embodiments, the insertion or deletion mutation creates an early stop codon.

[0063] In some embodiments, the inactivating results in a truncated protein encoded by the mutated allele. For example, the method of inactivating mutates a TET2 allele such that the mutated allele encodes a truncated form of a TET2 protein.

[0064] In some embodiments, the composition introduced to the cell further comprises a second RNA molecule comprising a guide sequence portion, wherein the guide sequence portion of the second RNA molecule comprises 17-50 contiguous nucleotides containing nucleotides in the sequence set forth in any one of SEQ ID NOs: 1-6220, preferably wherein the guide sequence portion of the second RNA molecule differs from the guide sequence portion of the first RNA molecule.

[0065] According to embodiments of the present invention, there is provided a method for inactivating alleles of the Programmed cell death protein 1 (PDCD1) gene in a cell, the method comprising
[0066] introducing to the cell a composition comprising:
   [0067] at least one CRISPR nuclease, or a polynucleotide molecule encoding a CRISPR nuclease; and
   [0068] an RNA molecule comprising a guide sequence portion, or a polynucleotide molecule encoding the RNA molecule,
[0069] wherein a complex of the CRISPR nuclease and the RNA molecule affects a double strand break in alleles of the PDCD1 gene,
[0070] wherein the guide sequence portion of the RNA molecule comprises 17-50 contiguous nucleotides containing nucleotides in the sequence set forth in any one of SEQ ID NOs: 1-6220 modified to contain 1, 2, 3, 4, or 5 nucleotide mismatches relative to a fully-complementary target sequence of the guide sequence portion.

[0071] In some embodiments, the guide sequence portion of the RNA molecule comprises 1, 2, 3, 4, or 5 nucleotide mismatches relative to a fully-complementary target sequence of the guide sequence portion.

[0072] In some embodiments, the guide sequence portion provides higher targeting specificity to the complex of the CRISPR nuclease and the RNA molecule relative to a guide sequence portion that has higher complementarity to an allele of the PDCD1 gene.

[0073] In some embodiments, the composition introduced to the cell further comprises a second RNA molecule comprising a guide sequence portion, wherein the guide sequence portion of the second RNA molecule comprises 17-50 contiguous nucleotides containing nucleotides in the sequence set forth in any one of SEQ ID NOs: 1-6220, or any one of SEQ ID NOs: 1-6220 modified to contain 1, 2, 3, 4, or 5 nucleotide mismatches relative to a fully-complementary target sequence of the guide sequence portion, preferably wherein the guide sequence portion of the second RNA molecule differs from the guide sequence portion of the first RNA molecule.

[0074] According to embodiments of the present invention, there is provided a composition comprising an RNA molecule which comprises a guide sequence portion comprising 17-50 contiguous nucleotides containing nucleotides in the sequence set forth in any one of SEQ ID NOs: 1-6220.

[0075] In some embodiments, the composition further comprises a second RNA molecule which comprises a guide sequence portion comprising 17-50 contiguous nucleotides containing nucleotides in the sequence set forth in any one of SEQ ID NOs: 1-6220, preferably wherein the guide sequence portion of the second RNA molecule differs from the guide sequence portion of the first RNA molecule.

[0076] According to embodiments of the present invention, there is provided a composition comprising an RNA molecule which comprises a guide sequence portion comprising 17-50 contiguous nucleotides containing nucleotides in the sequence set forth in any one of SEQ ID NOs: 1-6220, or any one of SEQ ID NOs: 1-6220 modified to contain 1, 2, 3, 4, or 5 nucleotide mismatches relative to a fully-complementary target sequence of the guide sequence portion.

[0077] In some embodiments, the composition further comprises a second RNA molecule which comprises a guide sequence portion comprising 17-50 contiguous nucleotides containing nucleotides in the sequence set forth in any one of SEQ ID NOs: 1-6220, or any one of SEQ ID NOs: 1-6220 modified to contain 1, 2, 3, 4, or 5 nucleotide mismatches relative to a fully-complementary target sequence of the guide sequence portion, preferably wherein the guide sequence portion of the second RNA molecule differs from the guide sequence portion of the first RNA molecule.

[0078] In some embodiments, any one of the compositions described herein further comprises a CRISPR nuclease.

[0079] In some embodiments, any one of the compositions described herein further comprises a tracrRNA molecule.

[0080] According to embodiments of the present invention, there is provided a cell modified by any one of the methods described herein or modified using the any one of the compositions described herein. The modified cell may also have additional genes altered in order to improve their use for adoptive transfer, for example, reducing or preventing graft-versus-host disease (GVHD).

[0081] Preferably all alleles of the PDCD1 gene are inactivated such that the modified cell cannot express a full-length, functional PDCD1 protein product.

[0082] In some embodiments, the cell is any one of a wherein the cell is a lymphocyte, a T cell, a T regulatory cell, a B cell, a natural killer (NK) cell, a macrophage, a stem cell, or a fibroblast, blood cell, hepatocyte, keratinocyte, or any other cell type capable of being reprogrammed to an induced pluripotent stem cell (iPSC).

[0083] In some embodiments, the cell is a hematopoietic stem cell (HSC), induced pluripotent stem cell (iPS cell), iPSc-derived cell, natural killer cell (NK), iPS-derived NK cell (iNK), T cell, innate-like T cell (iT), natural killer T cell (NKT), γδ T cell, iPSc-derived T cell, invariant NKT cell (iNKT), iPSc-derived NKT, monocyte, or macrophage.

[0084] In some embodiments, the cell is a stem cell or any cell type capable of being reprogrammed to an induced pluripotent stem cell (iPSC).

[0085] In some embodiments, the stem cell is differentiated after it is modified.

[0086] In some embodiments, the stem cell is differentiated into any one of a lymphocyte, a T cell, a T regulatory cell, a B cell, a natural killer (NK) cell, innate-like T cell (iT), natural killer T cells (NKT), γδ T cell, invariant NKT cells (iNKT), monocyte, or macrophage.

[0087] According to embodiments of the present invention, there is provided a medicament comprising any one of the compositions described herein for use in inactivating a PDCD1 allele in a cell, wherein the medicament is administered by delivering to the cell the composition.

[0088] According to embodiments of the present invention, there is provided a use of any one of the compositions or modified cells described herein for adoptive immunotherapy, for example, to treat cancer.

[0089] According to embodiments of the present invention, there is provided a medicament comprising any one of the compositions or modified cells described herein for use in adoptive immunotherapy, for example, to treat cancer.

[0090] According to embodiments of the present invention, there is provided a kit for inactivating a PDCD1 allele in a cell, comprising any one of the compositions described herein and instructions for delivering the composition to the cell.

[0091] In some embodiments, the composition is delivered to the cell ex vivo.

[0092] According to embodiments of the present invention, there is provided a kit for administering adoptive immunotherapy to a subject, comprising any one of the compositions or modified cells described herein and instructions for delivering any one of the compositions or modified cells to a subject in need of adoptive immunotherapy.

[0093] According to embodiments of the present invention, there is provided any one of the compositions or modified cells described herein for use in adoptive immunotherapy, comprising delivering any one of the compositions or modified cells described herein to a subject in need of adoptive immunotherapy.

[0094] A method of treating a disease or disorder, the method comprising delivering any one of the compositions or modified cells described herein to the subject, preferably wherein the disease or disorder is cancer.

[0095] According to embodiments of the present invention, there is provided a composition, method, process, kit, or use as characterized by one or more elements disclosed herein.

[0096] According to embodiments of the present invention, the modified immune cells (e.g., T cells) obtained by the described methods are intended to be used as a medicament for treating a cancer, infection, or immune disease in a subject in need thereof. The administration of the modified immune cell or a population thereof to a subject may be carried out in any convenient manner known in the art, including, but not limited to, aerosol inhalation, injection, ingestion, transfusion, implantation or transplantation. Injection or transfusion may be performed subcutaneously, intradermally, intratumorally, intranodally, intramedullary, intramuscularly, by intravenous or intralymphatic injection, or intraperitoneally. According to embodiments of the present invention, there is provided a method for adoptive cell therapy or prophylaxis comprising administering the modified cells to a subject suffering from or determined to be at risk of suffering from a cancer or an infection.

[0097] According to embodiments of the present invention, there is provided use of any one of the compositions or modified cells described herein for adoptive immunotherapy, comprising delivering the composition of any one of the compositions or modified cells described herein to a subject in need of adoptive immunotherapy.

[0098] According to embodiments of the present invention, there is provided a medicament comprising any one of the compositions or modified cells described herein for use in adoptive immunotherapy, wherein the medicament is administered by delivering any one of the compositions or modified cells described herein to a subject in need of adoptive immunotherapy.

[0099] According to embodiments of the present invention, there is provided an RNA molecule for use in modifying a cell (e.g. lymphocyte, T-cell, CAR-T cell) which may be used for adoptive immunotherapy. The RNA molecule may be delivered to the cell ex vivo, in vitro, or in vivo.

[0100] According to embodiments of the present invention, there is provided a kit for inactivating a PDCD1 allele in a cell, comprising any one of the compositions described herein and instructions for delivering the composition to the cell.

[0101] According to embodiments of the present invention, there is provided a cell modified by the method described herein or modified using the compositions described herein.

[0102] According to embodiments of the present invention, there is provided a gene editing composition comprising an RNA molecule comprising a guide sequence portion having 17-50 contiguous nucleotides containing nucleotides in the sequence set forth in any one of SEQ ID NOs: 1-6220. In some embodiments, the RNA molecule further comprises a portion having a sequence which binds to a CRISPR nuclease. In some embodiments, the sequence which binds to a CRISPR nuclease is a tracrRNA sequence. In some embodiments the RNA comprising a guide sequence portion is a crRNA molecule. In some embodiments an RNA molecule comprising a guide sequence portion is a single-guide RNA (sgRNA) molecule.

[0103] In some embodiments, the RNA molecule further comprises a portion having a tracr mate sequence.

[0104] In some embodiments, the RNA molecule may further comprise one or more linker portions.

[0105] According to embodiments of the present invention, an RNA molecule may be up to 1000, 900, 800, 700, 600, 500, 450, 400, 350, 300, 290, 280, 270, 260, 250, 240, 230, 220, 210, 200, 190, 180, 170, 160, 150, 140, 130, 120, 110, or 100 nucleotides in length. Each possibility represents a separate embodiment. In embodiments of the present invention, the RNA molecule may be 17 up to 300 nucleotides in length, 100 up to 300 nucleotides in length, 150 up to 300 nucleotides in length, 100 up to 500 nucleotides in length, 100 up to 400 nucleotides in length, 200 up to 300 nucleotides in length, 100 to 200 nucleotides in length, or 150 up to 250 nucleotides in length. Each possibility represents a separate embodiment.

[0106] According to some embodiments of the present invention, the composition further comprises a tracrRNA molecule.

[0107] According to some embodiments of the present invention, there is provided a method for inactivating PDCD1 expression in a cell, the method comprising delivering to the cell a composition comprising an RNA molecule comprising a guide sequence portion having 17-50 contiguous nucleotides containing nucleotides in the sequence set forth in any one of SEQ ID NOs: 1-6220 and a CRISPR nuclease.

[0108] According to embodiments of the present invention, at least one CRISPR nuclease and the RNA molecule or RNA molecules are delivered to the subject and/or cells substantially at the same time or at different times.

[0109] In some embodiments, a tracrRNA molecule is delivered to the subject and/or cells substantially at the same time or at different times as the CRISPR nuclease and RNA molecule or RNA molecules.

[0110] The compositions and methods of the present disclosure may be utilized for improved adoptive immunotherapy.

[0111] Any one of, or combination of, the strategies for deactivating PDCD1 expression described herein may be used in the context of the invention.

[0112] In embodiments of the present invention, a guide RNA molecule is used to direct a CRISPR nuclease to an exon or a splice site of a PDCD1 allele in order to create a double-stranded break (DSB), leading to insertion or deletion of nucleotides by inducing an error-prone non-homologous end-joining (NHEJ) mechanism and formation of a frameshift mutation in the PDCD1 allele. The frameshift mutation may result in, for example, inactivation or knockout of the PDCD1 allele by generation of an early stop codon in the PDCD1 allele and to generation of a truncated protein or to nonsense-mediated mRNA decay of the transcript of the allele. In further embodiments, one RNA molecule is used to direct a CRISPR nuclease to a promotor of a PDCD1 allele.

[0113] Embodiments of compositions described herein include at least one CRISPR nuclease, guide RNA molecule(s), and optionally a tracrRNA molecule(s), being effective in a subject or cells at the same time. The at least one CRISPR nuclease, guide RNA molecule(s), and optional tracrRNA molecule(s) may be delivered substantially at the same time or can be delivered at different times but have effect at the same time. For example, this includes delivering the CRISPR nuclease to the subject or cells before the guide RNA molecule and/or tracrRNA molecule is substantially extant in the subject or cells.

[0114] In some embodiments, the cell is a lymphocyte. In some embodiments, the cell is a T cell. In some embodiments, the cell is a T regulatory cell. In some embodiments, the cell is a B cell. In some embodiments, the cell is a natural killer (NK) cell. In some embodiments, the cell is a macrophage. In some embodiments, the cell is a stem cell. In some embodiments, the cell is a fibroblast, blood cell, hepatocyte, keratinocyte, or any other cell type capable of being reprogrammed to an induced pluripotent stem cell (iPSC).

### PDCD1 Editing Strategies

[0115] The present invention provides methods to knockout PDCD1 alleles in cells of a subject, thereby improving the performance of the cells, or cells derived therefrom, in adoptive transfer therapies.

[0116] PDCD1 editing strategies include, but are not limited to, biallelic knockout by targeting any one of, or a combination of, Exons 1-5, including within thirty nucleotides upstream and downstream of the exons to flank splice donor and acceptor sites, as frameshifts in these exons lead to non-functional, truncated PDCD1 proteins or non-sense mediated decay of the mutated PDCD1 transcripts.

### CRISPR Nucleases and PAM Recognition

[0117] In some embodiments, the sequence specific nuclease is selected from CRISPR nucleases, or is a functional variant thereof. In some embodiments, the sequence specific nuclease is an RNA guided DNA nuclease. In such embodiments, the RNA sequence which guides the RNA guided DNA nuclease (e.g., Cpf1) binds to and/or directs the RNA guided DNA nuclease to all PDCD1 alleles in a cell. In some embodiments, the CRISPR complex does not further comprise a tracrRNA. A skilled artisan will appreciate that RNA molecules can be engineered to bind to a target of choice in a genome by commonly known methods in the art.

[0118] The term “PAM” as used herein refers to a nucleotide sequence of a target DNA located in proximity to the targeted DNA sequence and recognized by the CRISPR nuclease complex. The PAM sequence may differ depending on the nuclease identity. In addition, there are CRISPR nucleases that can target almost all PAMs. In some embodiments of the present invention, a CRISPR system utilizes one or more RNA molecules having a guide sequence portion to direct a CRISPR nuclease to a target DNA site via Watson-Crick base-pairing between the guide sequence portion and the protospacer on the target DNA site, which is next to the protospacer adjacent motif (PAM), which is an additional requirement for target recognition. The CRISPR nuclease then mediates cleavage of the target DNA site to create a double-stranded break within the protospacer. In a non-limiting example, a type II CRISPR system utilizes a mature crRNA:tracrRNA complex that directs the CRISPR nuclease, e.g. Cas9 to the target DNA the target DNA via Watson-Crick base-pairing between the guide sequence portion of the crRNA and the protospacer on the target DNA next to the protospacer adjacent motif (PAM). A skilled artisan will appreciate that each of the engineered RNA molecule of the present invention is further designed such as to associate with a target genomic DNA sequence of interest next to a protospacer adjacent motif (PAM), e.g., a PAM matching the sequence relevant for the type of CRISPR nuclease utilized, such as for a non-limiting example, NGG or NAG, wherein “N” is any nucleobase, for Streptococcus pyogenes Cas9 WT (SpCAS9); NNGRRT for Staphylococcus aureus (SaCas9); NNNVRYM for jejuni Cas9 WT; NGAN or NGNG for SpCas9-VQR variant; NGCG for SpCas9-VRER variant; NGAG for SpCas9-EQR variant; NRRH for SpCas9-NRRH variant, wherein N is any nucleobase, R is A or G and H is A, C, or T; NRTH for SpCas9-NRTH variant, wherein N is any nucleobase, R is A or G and H is A, C, or T; NRCH for SpCas9-NRCH variant, wherein N is any nucleobase, R is A or G and H is A, C, or T; NG for SpG variant of SpCas9 wherein N is any nucleobase; NG or NA for SpCas9-NG variant of SpCas9 wherein N is any nucleobase; NR or NRN or NYN for SpRY variant of SpCas9, wherein N is any nucleobase, R is A or G and Y is C or T; NNG for Streptococcus canis Cas9 variant (ScCas9), wherein N is any nucleobase; NNNRRT for SaKKH-Cas9 variant of Staphylococcus aureus (SaCas9), wherein N is any nucleobase, and R is A or G; NNNNGATT for Neisseria meningitidis (NmCas9), wherein N is any nucleobase; TTN for Alicyclobacillus acidiphilus Cas12b (AacCas12b), wherein N is any nucleobase; or TTTV for Cpfl, wherein V is A, C or G. RNA molecules of the present invention are each designed to form complexes in conjunction with one or more different CRISPR nucleases and designed to target polynucleotide sequences of interest utilizing one or more different PAM sequences respective to the CRISPR nuclease utilized.

[0119] In some embodiments, an RNA-guided DNA nuclease e.g., a CRISPR nuclease, may be used to cause a DNA break, either double or single-stranded in nature, at a desired location in the genome of a cell. The most commonly used RNA-guided DNA nucleases are derived from CRISPR systems, however, other RNA-guided DNA nucleases are also contemplated for use in the genome editing compositions and methods described herein. For instance, see U.S. Patent Publication No. 2015/0211023, incorporated herein by reference.

[0120] CRISPR systems that may be used in the practice of the invention vary greatly. CRISPR systems can be a type I, a type II, or a type III system. Non-limiting examples of suitable CRISPR proteins include Cas3, Cas4, Cas5, Cas5e (or CasD), Cas6, Cas6e, Cas6f, Cas7, Cas8al, Cas8a2, Cas8b, Cas8c, Cas9, Casl0, Casl Od, CasF, CasG, CasH, Csyl, Csy2, Csy3, Csel (or CasA), Cse2 (or CasB), Cse3 (or CasE), Cse4 (or CasC), Cscl, Csc2, Csa5, Csn2, Csm2, Csm3, Csm4, Csm5, Csm6, Cmrl, Cmr3, Cmr4, Cmr5, Cmr6, Csbl, Csb2, Csb3, Csxl7, Csxl4, Csxl0, Csxl6, CsaX, Csx3, Cszl, Csxl5, Csfl, Csf2, Csf3, Csf4, and Cul966.

[0121] In some embodiments, the RNA-guided DNA nuclease is a CRISPR nuclease derived from a type II CRISPR system (e.g., Cas9). The CRISPR nuclease may be derived from Streptococcus pyogenes, Streptococcus thermophilus, Streptococcus sp., Staphylococcus aureus, Neisseria meningitidis, Treponema denticola, Nocardiopsis dassonvillei, Streptomyces pristinaespiralis, Streptomyces viridochromogenes, Streptomyces viridochromogenes, Streptosporangium roseum, Streptosporangium roseum, Alicyclobacillus acidocaldarius, Bacillus pseudomycoides, Bacillus selenitireducens, Exiguobacterium sibiricum, Lactobacillus delbrueckii, Lactobacillus salivarius, Microscilla marina, Burkholderiales bacterium, Polaromonas naphthalenivorans, Polaromonas sp., Crocosphaera watsonii, Cyanothece sp., Microcystis aeruginosa, Synechococcus sp., Acetohalobium arabaticum, Ammonifex degensii, Caldicelulosiruptor becscii, Candidatus Desulforudis, Clostridium botulinum, Clostridium dificile, Finegoldia magna, Natranaerobius thermophilus, Pelotomaculum thermopropionicum, Acidithiobacillus caldus, Acidithiobacillus ferrooxidans, Allochromatium vinosum, Marinobacter sp., Nitrosococcus halophilus, Nitrosococcus watsoni, Pseudoalteromonas haloplanktis, Ktedonobacter racemifer, Methanohalobium evestigatum, Anabaena variabilis, Nodularia spumigena, Nostoc sp., Arthrospira maxima, Arthrospira platensis, Arthrospira sp., Lyngbya sp., Microcoleus chthonoplastes, Oscillatoria sp., Petrotoga mobilis, Thermosipho africanus, Acaryochloris marina, or any species which encodes a CRISPR nuclease with a known PAM sequence. CRISPR nucleases encoded by uncultured bacteria may also be used in the context of the invention. (See Burstein et al. Nature, 2017). Variants of CRISPR proteins having known PAM sequences e.g., SpCas9 D1135E variant, SpCas9 VQR variant, SpCas9 EQR variant, or SpCas9 VRER variant may also be used in the context of the invention.

[0122] Thus, an RNA guided DNA nuclease of a CRISPR system, such as a Cas9 protein or modified Cas9 or homolog or ortholog of Cas9, or other RNA guided DNA nucleases belonging to other types of CRISPR systems, such as Cpf1 and its homologs and orthologs, may be used in the compositions of the present invention. Additional CRISPR nucleases may also be used, for example, the nucleases described in PCT International Application Publication Nos. WO2020/223514 and WO2020/223553, which are hereby incorporated by reference.

[0123] In certain embodiments, the CRISPR nuclease may be a “functional derivative” of a naturally occurring Cas protein. A “functional derivative” of a native sequence polypeptide is a compound having a qualitative biological property in common with a native sequence polypeptide. “Functional derivatives” include, but are not limited to, fragments of a native sequence and derivatives of a native sequence polypeptide and its fragments, provided that they have a biological activity in common with a corresponding native sequence polypeptide. A biological activity contemplated herein is the ability of the functional derivative to hydrolyze a DNA substrate into fragments. The term “derivative” encompasses both amino acid sequence variants of polypeptide, covalent modifications, and fusions thereof. Suitable derivatives of a Cas polypeptide or a fragment thereof include but are not limited to mutants, fusions, covalent modifications of Cas protein or a fragment thereof. Derivatives include, but are not limited to, CRISPR nickases, catalytically inactive or “dead” CRISPR nucleases, and fusion of a CRISPR nuclease or derivative thereof to other enzymes such as base editors or retrotransposons. See for example, Anzalone et al. (2019) and PCT International Application No. PCT/US2020/037560.

[0124] In some embodiments, the CRISPR nuclease or derivative thereof may be fused to a protein that has an enzymatic activity. In some embodiments, the enzymatic activity modifies a target DNA. In some embodiments, the enzymatic activity is nuclease activity, methyltransferase activity, demethylase activity, DNA repair activity, DNA damage activity, deamination activity, dismutase activity, alkylation activity, depurination activity, oxidation activity, pyrimidine dimer forming activity, integrase activity, transposase activity, recombinase activity, polymerase activity, ligase activity, helicase activity, photolyase activity or glycosylase activity. In some cases, the enzymatic activity is nuclease activity. In some cases, the nuclease activity introduces a double strand break in the target DNA. In some cases, the enzymatic activity modifies a target polypeptide associated with the target DNA. In some cases, the enzymatic activity is methyltransferase activity, demethylase activity, acetyltransferase activity, deacetylase activity, kinase activity, phosphatase activity, ubiquitin ligase activity, deubiquitinating activity, adenylation activity, deadenylation activity, SUMOylating activity, deSUMOylating activity, ribosylation activity, deribosylation activity, myristoylation activity or demyristoylation activity. In some cases, the target polypeptide is a histone and the enzymatic activity is methyltransferase activity, demethylase activity, acetyltransferase activity, deacetylase activity, kinase activity, phosphatase activity, ubiquitin ligase activity or deubiquitinating activity.

[0125] Cas protein, which includes Cas protein or a fragment thereof, as well as derivatives of Cas protein or a fragment thereof, may be obtainable from a cell or synthesized chemically or by a combination of these two procedures. The cell may be a cell that naturally produces Cas protein, or a cell that naturally produces Cas protein and is genetically engineered to produce the endogenous Cas protein at a higher expression level or to produce a Cas protein from an exogenously introduced nucleic acid, which nucleic acid encodes a Cas that is same or different from the endogenous Cas. In some cases, the cell does not naturally produce Cas protein and is genetically engineered to produce a Cas protein.

[0126] In some embodiments, the CRISPR nuclease is Cpf1. Cpf1 is a single RNA-guided endonuclease which utilizes a T-rich protospacer-adjacent motif. Cpf1 cleaves DNA via a staggered DNA double-stranded break. Two Cpf1 enzymes from Acidaminococcus and Lachnospiraceae have been shown to carry out efficient genome-editing activity in human cells. (See Zetsche et al., 2015).

[0127] Thus, an RNA guided DNA nuclease of a Type II CRISPR System, such as a Cas9 protein or modified Cas9 or homologs, orthologues, or variants of Cas9, or other RNA guided DNA nucleases belonging to other types of CRISPR systems, such as Cpf1 and its homologs, orthologues, or variants, may be used in the present invention.

[0128] In some embodiments, the guide molecule comprises one or more chemical modifications which imparts a new or improved property (e.g., improved stability from degradation, improved hybridization energetics, or improved binding properties with an RNA guided DNA nuclease). Suitable chemical modifications include, but are not limited to: modified bases, modified sugar moieties, or modified inter-nucleoside linkages. Non-limiting examples of suitable chemical modifications include: 4-acetylcytidine, 5-(carboxyhydroxymethyl)uridine, 2′O-methylcytidine, 5-carboxymethylaminomethyl-2-thiouridine, 5-carboxymethylaminomethyluridine, dihydrouridine, 2′-O-methylpseudouridine, “beta, D-galactosylqueosine”, 2′-O-methylguanosine, inosine, N6-isopentenyladenosine, 1-methyladenosine, 1-methylpseudouridine, 1-methylguanosine, 1-methylinosine, “2,2-dimethylguanosine”, 2-methyladenosine, 2-methylguanosine, 3-methylcytidine, 5-methylcytidine, N6-methyladenosine, 7-methylguanosine, 5-methylaminomethyluridine, 5-methoxyaminomethyl-2-thiouridine, “beta, D-mannosylqueosine”, 5-methoxycarbonylmethyl-2-thiouridine, 5-methoxycarbonylmethyluridine, 5-methoxyuridine, 2-methylthio-N6-isopentenyladenosine, N-((9-beta-D-ribofuranosyl-2-methylthiopurine-6-yl)carbamoyl)threonine, N-((9-beta-D-ribofuranosylpurine-6-yl)N-methylcarbamoyl)threonine, uridine-5-oxyacetic acid-methylester, uridine-5-oxyacetic acid, wybutoxosine, queuosine, 2-thiocytidine, 5-methyl-2-thiouridine, 2-thiouridine, 4-thiouridine, 5-methyluridine, N-((9-beta-D-ribofuranosylpurine-6-yl)-carbamoyl)threonine, 2′-O-methyl-5-methyluridine, 2′-O-methyluridine, wybutosine, “3-(3-amino-3-carboxy-propyl)uridine, (acp3)u”, 2′-0-methyl (M), 3′-phosphorothioate (MS), 3′-thioPACE (MSP), pseudouridine, or 1-methyl pseudo-uridine. Each possibility represents a separate embodiment of the present invention.

[0129] In addition to targeting PDCD1 alleles by a RNA-guided CRISPR nuclease, other means of inhibiting PDCD1 expression in a target cell include but are not limited to use of a gapmer, shRNA, siRNA, a customized TALEN, meganuclease, or zinc finger nuclease, a small molecule inhibitor, and any other method known in the art for reducing or eliminating expression of a gene in a target cell. See, for example, U.S. Pat. Nos. 6,506,559; 7,560,438; 8,420,391; 8,552,171; 7,056,704; 7,078,196; 8,362,231; 8,372,968; 9,045,754; and PCT International Publication Nos. WO/2004/067736; WO/2006/097853; WO/2003/087341; WO/2000/0415661; WO/2003/080809; WO/2010/079430; WO/2010/079430; WO/2011/072246; WO/2018/057989; and WO/2017/164230, the entire contents of each of which are incorporated herein by reference.

[0130] Advantageously, the guide RNA molecules presented herein provide improved PDCD1 knockout efficiency when complexed with a CRISPR nuclease in a cell relative to other guide RNA molecules. These specifically designed sequences may also be useful for identifying PDCD1 target sites for other nucleotide targeting-based gene-editing or gene-silencing methods, for example, siRNA, TALENs, meganucleases or zinc-finger nucleases.

### Delivery to Cells

[0131] Any one of the compositions described herein may be delivered to a target cell by any suitable means. RNA molecule compositions of the present invention may be targeted to any cell which contains and/or expresses a PDCD1 allele, such as a mammalian lymphocyte or stem cell. For example, in one embodiment the RNA molecule specifically targets PDCD1 alleles in a target cell and the target cell is a lymphocyte, a T cell, a T regulatory cell, a B cell, a natural killer (NK) cell, a macrophage, a stem cell, or a fibroblast, blood cell, hepatocyte, keratinocyte, or any other cell type capable of being reprogrammed to an induced pluripotent stem cell (iPSC). The delivery to the cell may be performed in vivo, ex vivo, or in vitro. Further, the nucleic acid compositions described herein may be delivered to a cell as one or more of DNA molecules, RNA molecules, ribonucleoproteins (RNP), nucleic acid vectors, or any combination thereof.

[0132] In some embodiments, the RNA molecule comprises a chemical modification. Non-limiting examples of suitable chemical modifications include 2′-0-methyl (M), 2′-0-methyl, 3′phosphorothioate (MS) or 2′-0-methyl, 3′thioPACE (MSP), pseudouridine, and 1-methyl pseudo-uridine. Each possibility represents a separate embodiment of the present invention.

[0133] In some embodiments, any one of the compositions described herein is delivered to a cell in-vivo. The composition may be delivered to the cell by any known in-vivo delivery method, including but not limited to, viral transduction, for example, using a lentivirus or adeno-associated virus (AAV), nanoparticle delivery, etc. Additional detailed delivery methods are described throughout this section.

[0134] In some embodiments, any one of the compositions described herein is delivered to a cell ex-vivo. The composition may be delivered to the cell by any known ex-vivo delivery method, including but not limited to, nucleofection, electroporation, viral transduction, for example, using a lentivirus or adeno-associated virus (AAV), nanoparticle delivery, liposomes, etc. Additional detailed delivery methods are described throughout this section.

[0135] Any suitable viral vector system may be used to deliver nucleic acid compositions e.g., the RNA molecule compositions of the subject invention. Conventional viral and non-viral based gene transfer methods can be used to introduce nucleic acids and target tissues. In certain embodiments, nucleic acids are administered for in vivo or ex vivo gene therapy uses. Non-viral vector delivery systems include naked nucleic acid, and nucleic acid complexed with a delivery vehicle such as a liposome or poloxamer. For a review of gene therapy procedures, see Anderson (1992); Nabel & Felgner (1993); Mitani & Caskey (1993); Dillon (1993); Miller (1992); Van Brunt (1988); Vigne (1995); Kremer & Perricaudet (1995); Haddada et al. (1995); and Yu et al. (1994).

[0136] Methods of non-viral delivery of nucleic acids and/or proteins include electroporation, lipofection, microinjection, biolistics, particle gun acceleration, virosomes, liposomes, immunoliposomes, lipid nanoparticles (LNPs), polycation or lipid:nucleic acid conjugates, artificial virions, and agent-enhanced uptake of nucleic acids or can be delivered to plant cells by bacteria or viruses (e.g., Agrobacterium, Rhizobium sp. NGR234, Sinorhizobium meliloti, Mesorhizobium loti, tobacco mosaic virus, potato virus X, cauliflower mosaic virus and cassava vein mosaic virus). (See, e.g., Chung et al., 2006). Sonoporation using, e.g., the Sonitron 2000 system (Rich-Mar), can also be used for delivery of nucleic acids. Cationic-lipid mediated delivery of proteins and/or nucleic acids is also contemplated as an in vivo, ex vivo, or in vitro delivery method. (See Zuris et al. (2015); see also Coelho et al. (2013); Judge et al. (2006); and Basha et al. (2011)).

[0137] Non-viral vectors, such as transposon-based systems e.g. recombinant Sleeping Beauty transposon systems or recombinant PiggyBac transposon systems, may also be delivered to a target cell and utilized for transposition of a polynucleotide sequence of a molecule of the composition or a polynucleotide sequence encoding a molecule of the composition in the target cell.

[0138] Additional exemplary nucleic acid delivery systems include those provided by Amaxa® Biosystems (Cologne, Germany), Maxcyte, Inc. (Rockville, Md.), BTX Molecular Delivery Systems (Holliston, Mass.) and Copernicus Therapeutics Inc., (see, e.g., U.S. Pat. No. 6,008,336). Lipofection is described in e.g., U.S. Pat. Nos. 5,049,386, 4,946,787; and 4,897,355, and lipofection reagents are sold commercially (e.g., Transfectam™, Lipofectin™ and Lipofectamine™ RNAiMAX). Cationic and neutral lipids that are suitable for efficient receptor-recognition lipofection of polynucleotides include those disclosed in PCT International Publication Nos. WO/1991/017424 and WO/1991/016024. Delivery can be to cells (ex vivo administration) or target tissues (in vivo administration).

[0139] The preparation of lipid:nucleic acid complexes, including targeted liposomes such as immunolipid complexes, is well known to one of skill in the art (see, e.g., Crystal, Science (1995); Blaese et al., (1995); Behr et al., (1994); Remy et al. (1994); Gao and Huang (1995); Ahmad and Allen (1992); U.S. Pat. Nos. 4,186,183; 4,217,344; 4,235,871; 4,261,975; 4,485,054; 4,501,728; 4,774,085; 4,837,028; and 4,946,787).

[0140] Additional methods of delivery include the use of packaging the nucleic acids to be delivered into EnGeneIC delivery vehicles (EDVs). These EDVs are specifically delivered to target tissues using bispecific antibodies where one arm of the antibody has specificity for the target tissue and the other has specificity for the EDV. The antibody brings the EDVs to the target cell surface and then the EDV is brought into the cell by endocytosis. Once in the cell, the contents are released (See MacDiarmid et al., 2009).

[0141] Delivery vehicles include, but are not limited to, bacteria, preferably non-pathogenic, vehicles, nanoparticles, exosomes, microvesicles, gene gun delivery, for example, by attachment of a composition to a gold particle which is fired into a cell using via a “gene-gun”, viral vehicles, including but not limited to lentiviruses, AAV, and retroviruses), virus-like particles (VLPs). large VLPs (LVLPs), lentivirus-like particles, transposons, viral vectors, naked vectors, DNA, or RNA, among other delivery vehicles known in the art.

[0142] The delivery of a CRISPR nuclease and/or a polynucleotide encoding the CRISPR nuclease, and optionally additional nucleotide molecules and/or additional proteins or peptides, may be performed by utilizing a single delivery vehicle or method or a combination of different delivery vehicles or methods. For example, a CRISPR nuclease may be delivered to a cell utilizing an LNP, and a crRNA molecule and tracrRNA molecule may be delivered to the cell utilizing AAV. Alternatively, a CRISPR nuclease may be delivered to a cell utilizing an AAV particle, and a crRNA molecule and tracrRNA molecule may be delivered to the cell utilizing a separate AAV particle, which may be advantageous due to size limitations.

[0143] The use of RNA or DNA viral based systems for viral mediated delivery of nucleic acids take advantage of highly evolved processes for targeting a virus to specific cells in the body and trafficking the viral payload to the nucleus. Viral vectors can be administered directly to patients (in vivo) or they can be used to treat cells in vitro and the modified cells are administered to patients (ex vivo). Conventional viral based systems for the delivery of nucleic acids include, but are not limited to, retroviral, lentivirus, adenoviral, adeno-associated, vaccinia and herpes simplex virus vectors for gene transfer. An RNA virus may be utilized for delivery of the compositions described herein. Additionally, high transduction efficiencies have been observed in many different cell types and target tissues. Nucleic acid of the invention may be delivered by non-integrating lentivirus. Optionally, RNA delivery with Lentivirus is utilized. Optionally the lentivirus includes mRNA of the nuclease and a guide RNA molecule. Optionally, the lentivirus includes the nuclease protein and a guide RNA molecule. Optionally the lentivirus includes mRNA of the nuclease, a guide RNA molecule, and a tracrRNA molecule. Optionally, the lentivirus includes the nuclease protein, a guide RNA molecule, and a tracrRNA molecule.

[0144] The tropism of a retrovirus can be altered by incorporating foreign envelope proteins, expanding the potential target population of target cells. Lentiviral vectors are retroviral vectors that are able to transduce or infect non-dividing cells and typically produce high viral titers. Selection of a retroviral gene transfer system depends on the target tissue. Retroviral vectors are comprised of cis-acting long terminal repeats with packaging capacity for up to 6-10 kb of foreign sequence. The minimum cis-acting LTRs are sufficient for replication and packaging of the vectors, which are then used to integrate the therapeutic gene into the target cell to provide permanent transgene expression. Widely used retroviral vectors include those based upon murine leukemia virus (MuLV), gibbon ape leukemia virus (GaLV), Simian Immunodeficiency virus (SIV), human immunodeficiency virus (HIV), and combinations thereof (See, e.g., Buchschacher et al. (1992); Johann et al. (1992); Sommerfelt et al. (1990); Wilson et al. (1989); Miller et al. (1991); PCT International Publication No. WO/1994/026877A1).

[0145] At least six viral vector approaches are currently available for gene transfer in clinical trials, which utilize approaches that involve complementation of defective vectors by genes inserted into helper cell lines to generate the transducing agent.

[0146] pLASN and MFG-S are examples of retroviral vectors that have been used in clinical trials (See Dunbar et al., 1995; Kohn et al., 1995; Malech et al., 1997). PA317/pLASN was the first therapeutic vector used in a gene therapy trial (Blaese et al., 1995). Transduction efficiencies of 50% or greater have been observed for MFG-S packaged vectors. (Ellem et al., (1997); Dranoff et al., 1997).

[0147] Packaging cells are used to form virus particles that are capable of infecting a host cell. Such cells include 293 cells, which package adenovirus, AAV, and Psi-2 cells or PA317 cells, which package retrovirus. Viral vectors used in gene therapy are usually generated by a producer cell line that packages a nucleic acid vector into a viral particle. The vectors typically contain the minimal viral sequences required for packaging and subsequent integration into a host (if applicable), other viral sequences being replaced by an expression cassette encoding the protein to be expressed. The missing viral functions are supplied in trans by the packaging cell line. For example, AAV vectors used in gene therapy typically only possess inverted terminal repeat (ITR) sequences from the AAV genome which are required for packaging and integration into the host genome. Viral DNA is packaged in a cell line, which contains a helper plasmid encoding the other AAV genes, namely rep and cap, but lacking ITR sequences. The cell line is also infected with adenovirus as a helper. The helper virus promotes replication of the AAV vector and expression of AAV genes from the helper plasmid. The helper plasmid is not packaged in significant amounts due to a lack of ITR sequences. Contamination with adenovirus can be reduced by, e.g., heat treatment to which adenovirus is more sensitive than AAV. Additionally, AAV can be produced at clinical scale using baculovirus systems (see U.S. Pat. No. 7,479,554).

[0148] In many gene therapy applications, it is desirable that the gene therapy vector be delivered with a high degree of specificity to a particular tissue type. Accordingly, a viral vector can be modified to have specificity for a given cell type by expressing a ligand as a fusion protein with a viral coat protein on the outer surface of the virus. The ligand is chosen to have affinity for a receptor known to be present on the cell type of interest. For example, Han et al. (1995) reported that Moloney murine leukemia virus can be modified to express human heregulin fused to gp70, and the recombinant virus infects certain human breast cancer cells expressing human epidermal growth factor receptor. This principle can be extended to other virus-target cell pairs, in which the target cell expresses a receptor and the virus expresses a fusion protein comprising a ligand for the cell-surface receptor. For example, filamentous phage can be engineered to display antibody fragments (e.g., FAB or Fv) having specific binding affinity for virtually any chosen cellular receptor. Although the above description applies primarily to viral vectors, the same principles can be applied to nonviral vectors. Such vectors can be engineered to contain specific uptake sequences which favor uptake by specific target cells.

[0149] Gene therapy vectors can be delivered in vivo by administration to an individual patient, for example by systemic administration (e.g., intravitreal, intravenous, intraperitoneal, intramuscular, subdermal, or intracranial infusion) or topical application.

[0150] Alternatively, vectors can be delivered to cells ex vivo, such as cells explanted from an individual patient (e.g., lymphocytes, bone marrow aspirates, tissue biopsy) or universal donor hematopoietic stem cells, followed by reimplantation of the cells into a patient, optionally after selection for cells which have incorporated the vector. A non-limiting exemplary ex vivo approach may involve removal of tissue (e.g., peripheral blood, bone marrow, and spleen) from a patient for culture, nucleic acid transfer to the cultured cells (e.g., hematopoietic stem cells), followed by grafting the cells to a target tissue (e.g., bone marrow, and spleen) of the patient. In some embodiments, the stem cell or hematopoietic stem cell may be further treated with a viability enhancer.

[0151] Ex vivo cell transfection for diagnostics, research, or for gene therapy (e.g., via re-infusion of the transfected cells into the host organism) is well known to those of skill in the art. In a preferred embodiment, cells are isolated from the subject organism, transfected with a nucleic acid composition, and re-infused back into the subject organism (e.g., patient). Various cell types suitable for ex vivo transfection are well known to those of skill in the art (See, e.g., Freshney, “Culture of Animal Cells, A Manual of Basic Technique and Specialized Applications (6th edition, 2010) and the references cited therein for a discussion of how to isolate and culture cells from patients).

[0152] Vectors (e.g., retroviruses, liposomes, etc.) containing therapeutic nucleic acid compositions can also be administered directly to an organism for transduction of cells in vivo. Administration is by any of the routes normally used for introducing a molecule into ultimate contact with blood or tissue cells including, but not limited to, injection, infusion, topical application (e.g., eye drops and cream) and electroporation. Suitable methods of administering such nucleic acids are available and well known to those of skill in the art, and, although more than one route can be used to administer a particular composition, a particular route can often provide a more immediate and more effective reaction than another route. According to some embodiments, the composition is delivered via IV injection.

[0153] Vectors suitable for introduction of transgenes into immune cells (e.g., T-cells) include non-integrating lentivirus vectors. See, e.g., U.S. Patent Publication No. 2009/0117617.

[0154] As mentioned above, the compositions described herein may be delivered to a target cell using a non-integrating lentiviral particle method, e.g. a LentiFlash® system. Such a method may be used to deliver mRNA or other types of RNAs into the target cell, such that delivery of the RNAs to the target cell results in assembly of the compositions described herein inside of the target cell. See also PCT International Publication Nos. WO/2013/014537, WO/2014/016690, WO/2016/185125, WO/2017/194902, and WO/2017/194903.

[0155] Pharmaceutically acceptable carriers are determined in part by the particular composition being administered, as well as by the particular method used to administer the composition. Accordingly, there is a wide variety of suitable formulations of pharmaceutical compositions available, as described below (See, e.g., Remington's Pharmaceutical Sciences, 17th ed., 1989).

Examples of RNA Guide Sequences which Specifically Target Alleles of PDCD1 Gene

[0156] Although a large number of guide sequences can be designed to target the PDCD1 gene, the nucleotide sequences described in Table 2 and are identified by SEQ ID NOs: 1-6215 were specifically selected to effectively implement the methods set forth herein.

[0157] Table 2 lists guide sequences designed for use as described in the embodiments above to associate specific sequences within a PDCD1 allele. Each engineered guide molecule is further designed such as to associate with a target genomic DNA sequence of interest that lies next to a protospacer adjacent motif (PAM), e.g., a PAM matching the sequence NGG or NAG, where “N” is any nucleobase. The guide sequences were designed to work in conjunction with one or more different CRISPR nucleases, including, but not limited to, e.g. SpCas9WT (PAM SEQ: NGG), SpCas9.VQR.1 (PAM SEQ: NGAN), SpCas9.VQR.2 (PAM SEQ: NGNG), SpCas9.EQR (PAM SEQ: NGAG), SpCas9.VRER (PAM SEQ: NGCG), SaCas9WT (PAM SEQ: NNGRRT), SpRY (PAM SEQ: NRN or NYN), NmCas9WT (PAM SEQ: NNNNGATT), Cpf1 (PAM SEQ: TTTV), JeCas9WT (PAM SEQ: NNNVRYM), OMNI-50 (PAM SEQ: NGG), OMNI-79 (PAM SEQ: NGG), OMNI-103 (PAM SEQ: NNRACT), OMNI-159 (NNNNCMAN), or OMNI-124 (PAM SEQ: NNGNRMNN).

[0158] Additional description of OMNI CRISPR nucleases is provided in PCT International Application Publication No. WO 2023/019269 A2, PCT International Application Publication Nos. WO 2022/170199 A2 and WO 2023/107946 A2, U.S. Pat. No. 11,666,641 B2 and PCT International Application Publication Nos. WO 2020/223514 A2, WO 2022/098693 A1, and WO 2023/019263 A1, U.S. Application Publication No. 2023/0122086 A1 and PCT International Application Publication Nos. WO 2021/248016 A2 and WO 2023/102407 A2, PCT International Application Publication No. WO 2022/087135 A1, and PCT International Application Publication No. WO 2022/226215 A1, the contents of each of which are hereby incorporated by reference.

[0159] RNA molecules of the present invention are each designed to form complexes in conjunction with one or more different CRISPR nucleases and designed to target polynucleotide sequences of interest utilizing one or more different PAM sequences respective to the CRISPR nuclease utilized.

[0160] As used herein, the following nucleotide identifiers are used to represent a referenced nucleotide base(s):

TABLE 1

| | |
|---|---|
| Nucleotide | |
| reference | Base(s) represented |

| | | | | |
|---|---|---|---|---|
| A | A | | | |
| C | | C | | |
| G | | | G | |
| T | | | | T |
| W | A | | | T |
| S | | C | G | |
| M | A | C | | |
| K | | | G | T |
| R | A | | G | |
| Y | | C | | T |
| B | | C | G | T |
| D | A | | G | T |
| H | A | C | | T |
| V | A | C | G | |
| N | A | C | G | T |

TABLE 2
Guide sequence portions designed to associate with specific PDCD1 gene targets

| | SEQ ID NOs: of | SEQ ID NOs: of | SEQ ID NOs: of |
|---|---|---|---|
| Target | 20 base guides | 21 base guides | 22 base guides |
| 2:241858724-241858876 | 1-252 | 253-502 | 503-750 |
| Exon 1, including 30 nt | | | |
| upstream and 30 nt downstream | | | |
| of the exon | | | |
| 2:241852582-241853018 | 751-1508 | 1509-2223 | 2224-2952 |
| Exon 2, including 30 nt | | | |
| upstream and 30 nt downstream | | | |
| of the exon | | | |
| 2:241852159-241852391 | 2953-3358 | 3359-3727 | 3728-4114 |
| Exon 3, including 30 nt | | | |
| upstream and 30 nt downstream | | | |
| of the exon | | | |
| 2:241851910-241852021 | 4115-4274 | 4275-4422 | 4423-4570 |
| Exon 4, including 30 nt | | | |
| upstream and 30 nt downstream | | | |
| of the exon | | | |
| 2:241851019-241851335 | 4571-5130 | 5131-5666 | 5667-6214 |
| Exon 5, including 30 nt | | | |
| upstream and 30 nt downstream | | | |
| of the exon | | | |

The indicated locations listed in column 1 of the Table 2 are based on gnomAD v3 database and UCSC Genome Browser assembly ID: hg38, Sequencing/Assembly provider ID: Genome Reference Consortium Human GRCh38.p12 (GCA_000001405.27). Assembly date: December 2013 initial release; December 2017 patch release 12.

[0161] Examples are provided below to facilitate a more complete understanding of the invention. The following examples illustrate the exemplary modes of making and practicing the invention. However, the scope of the invention is not limited to specific embodiments disclosed in these Examples, which are for purposes of illustration only.

### EXPERIMENTAL DETAILS

### Example 1: PDCD1 Modification Analysis

[0162] Guide sequences comprising 17-50 contiguous nucleotides containing nucleotides in the sequence set forth in any one of SEQ ID NOs: 1-6215 are screened for high on target activity using a CRISPR nuclease in T cells. On target activity is determined by DNA capillary electrophoresis analysis.

### Example 2: PDCD1 Editing in HeLa and Primary T Cells

[0163] PDCD1 editing in HeLa cells and primary T cells using a subset of the disclosed PDCD1-targeting guide sequence portions are shown in FIG. 1 and FIG. 2.

[0164] A summary table of the PDCD1 editing data is shown below:

TABLE 3

| | | | % editing | % editing |
|---|---|---|---|---|
| Target | | | NGS | NGS |
| Site | Spacer Name | Guide Sequence Portion | (HeLa) | (T cells) |
| 40 | hPDCD1_S40_22 bp_II | AACACAUCGGAGAGCUUCGUGC | 22.71 | |
| | | (SEQ ID NO: 2226) | | |
| 92 | hPDCD1_S92_22 bp_II | GAGGACCGCAGCCAGCCCGGCC | 39.33 | |
| | | (SEQ ID NO: 6215) | | |
| 98 | hPDCD1_S98_22 bp_II | GGGGACAACGCCACCUUCACCU | 66.30 | 44 |
| | | (SEQ ID NO: 2757) | | |
| 99 | hPDCD1_S99_22 bp_II | UGCAGCUUCUCCAACACAUCGG | 36.90 | |
| | | (SEQ ID NO: 2887) | | |
| 102 | hPDCD1_S102_22 bp_II | CUGCGGUCCUCGGGGAAGGCGG | 23.06 | |
| | | (SEQ ID NO: 2573) | | |

[0165] OMNI-103 related sequences are provided in the table below:

TABLE 4

| | | OMNI-103 DNA | |
|---|---|---|---|
| | | sequence codon | |
| OMNI-103 Amino Acid | OMNI-103 DNA | optimized for expression | OMNI-103 sgRNA |
| Sequence | sequence | in human cells | scaffold sequence |
| SEQ ID NO: 6221 | SEQ ID NO: 6222 | SEQ ID NO: 6223 | SEQ ID NO: 6224 |

### REFERENCES

[0166] 1. Ahmad and Allen (1992) “Antibody-mediated Specific Binging and Cytotoxicity of Liposome-entrapped Doxorubicin to Lung Cancer Cells in Vitro”, Cancer Research 52:4817-20.
[0167] 2. Anderson (1992) “Human gene therapy”, Science 256:808-13.
[0168] 3. Anzalone et al. (2019) “Search-and-replace genome editing without double-strand brakes or donor DNA”, Nature 576, 149-157.
[0169] 4. Basha et al. (2011) “Influence of Cationic Lipid Composition on Gene Silencing Properties of Lipid Nanoparticle Formulations of siRNA in Antigen-Presenting Cells”, Mol. Ther. 19(12):2186-200.
[0170] 5. Behr (1994) Gene transfer with synthetic cationic amphiphiles: Prospects for gene therapy”, Bioconjugate Chem 5:382-89.
[0171] 6. Blaese (1995) “Vectors in cancer therapy: how will they deliver”, Cancer Gene Ther. 2:291-97.
[0172] 7. Blaese et al. (1995) “T lymphocyte-directed gene therapy for ADA-SCID: initial trial results after 4 years”, Science 270(5235):475-80.
[0173] 8. Buchschacher and Panganiban (1992) “Human immunodeficiency virus vectors for inducible expression of foreign genes”, J. Virol. 66:2731-39.
[0174] 9. Burstein et al. (2017) “New CRISPR-Cas systems from uncultivated microbes”, Nature 542:237-41.
[0175] 10. Chang and Wilson (1987) “Modification of DNA ends can decrease end-joining relative to homologous recombination in mammalian cells”, Proc. Natl. Acad. Sci. USA 84:4959-4963.
[0176] 11. Chung et al. (2006) “Agrobacterium is not alone: gene transfer to plants by viruses and other bacteria”, Trends Plant Sci. 11(1):1-4.
[0177] 12. Coelho et al. (2013) “Safety and efficacy of RNAi therapy for transthyretin amyloidosis” N. Engl. J. Med. 369, 819-829.
[0178] 13. Collias and Beisel (2021) “CRISPR technologies and the search for the PAM-free nuclease”, Nature Communications 12, 555.
[0179] 14. Crystal (1995) “Transfer of genes to humans: early lessons and obstacles to success”, Science 270(5235):404-10.
[0180] 15. Dillon (1993) “Regulation gene expression in gene therapy” Trends in Biotechnology 11(5):167-173.
[0181] 16. Dranoff et al. (1997) “A phase I study of vaccination with autologous, irradiated melanoma cells engineered to secrete human granulocyte macrophage colony stimulating factor”, Hum. Gene Ther. 8(1):111-23.
[0182] 17. Dunbar et al. (1995) “Retrovirally marked CD34-enriched peripheral blood and bone marrow cells contribute to long-term engraftment after autologous transplantation”, Blood 85:3048-57.
[0183] 18. Ellem et al. (1997) “A case report: immune responses and clinical course of the first human use of granulocyte/macrophage-colony-stimulating-factor-transduced autologous melanoma cells for immunotherapy”, Cancer Immunol Immunother 44:10-20.
[0184] 19. Gao and Huang (1995) “Cationic liposome-mediated gene transfer” Gene Ther. 2(10):710-22.
[0185] 20. Haddada et al. (1995) “Gene Therapy Using Adenovirus Vectors”, in: The Molecular Repertoire of Adenoviruses III: Biology and Pathogenesis, ed. Doerfler and Böhm, pp. 297-306.
[0186] 21. Han et al. (1995) “Ligand-directed retro-viral targeting of human breast cancer cells”, Proc Natl Acad Sci U.S.A. 92(21):9747-51.
[0187] 22. Hu et al. (2018) “Evolved Cas9 variants with broad PAM compatibility and high DNA specificity”, Nature 556(7699):57-63.
[0188] 23. Jinek et al. (2012) “A programmable dual-RNA-guided DNA endonuclease in adaptive bacterial immunity,” Science 337(6096):816-21.
[0189] 24. Johan et al. (1992) “GLVR1, a receptor for gibbon ape leukemia virus, is homologous to a phosphate permease of Neurospora crassa and is expressed at high levels in the brain and thymus”, J Virol 66(3):1635-40.
[0190] 25. Judge et al. (2006) “Design of noninflammatory synthetic siRNA mediating potent gene silencing in vivo”, Mol Ther. 13(3):494-505.
[0191] 26. Kohn et al. (1995) “Engraftment of gene-modified umbilical cord blood cells in neonates with adnosine deaminase deficiency”, Nature Medicine 1:1017-23.
[0192] 27. Kremer and Perricaudet (1995) “Adenovirus and adeno-associated virus mediated gene transfer”, Br. Med. Bull. 51(1):31-44.
[0193] 28. Macdiarmid et al. (2009) “Sequential treatment of drug-resistant tumors with targeted minicells containing siRNA or a cytotoxic drug”, Nat Biotechnol. 27(7):643-51.
[0194] 29. Malech et al. (1997) “Prolonged production of NADPH oxidase-corrected granulocytes after gene therapy of chronic granulomatous disease”, PNAS 94(22):12133-38.
[0195] 30. Miller et al. (1991) “Construction and properties of retrovirus packaging cells based on gibbon ape leukemia virus”, J Virol. 65(5):2220-24.
[0196] 31. Miller (1992) “Human gene therapy comes of age”, Nature 357:455-60.
[0197] 32. Mitani and Caskey (1993) “Delivering therapeutic genes—matching approach and application”, Trends in Biotechnology 11(5):162-66.
[0198] 33. Nabel and Felgner (1993) “Direct gene transfer for immunotherapy and immunization”, Trends in Biotechnology 11(5):211-15.
[0199] 34. Nishimasu et al. (2018) “Engineered CRISPR-Cas9 nuclease with expanded targeting space”, Science 361(6408):1259-1262.
[0200] 35. Remy et al. (1994) “Gene Transfer with a Series of Lipophilic DNA-Binding Molecules”, Bioconjugate Chem. 5(6):647-54.
[0201] 36. Sentmanat et al. (2018) “A Survey of Validation Strategies for CRISPR-Cas9 Editing”, Scientific Reports 8:888, doi:10.1038/s41598-018-19441-8.
[0202] 37. Sommerfelt et al. (1990) “Localization of the receptor gene for type D simian retroviruses on human chromosome 19”, J. Virol. 64(12):6214-20.
[0203] 38. Van Brunt (1988) “Molecular framing: transgenic animals as bioactors” Biotechnology 6:1149-54.
[0204] 39. Vigne et al. (1995) “Third-generation adenovectors for gene therapy”, Restorative Neurology and Neuroscience 8(1,2): 35-36.
[0205] 40. Walton et al. (2020) “Unconstrained genome targeting with near-PAMless engineered CRISPR-Cas9 variants”, Science 368(6488):290-296.
[0206] 41. Weissman and Kariko (2015) “mRNA: Fulfilling the promise of gene therapy”, Molecular Therapy (9):1416-7.
[0207] 42. Wilson et al. (1989) “Formation of infectious hybrid virion with gibbon ape leukemia virus and human T-cell leukemia virus retroviral envelope glycoproteins and the gag and pol proteins of Moloney murine leukemia virus”, J. Virol. 63:2374-78.
[0208] 43. Yu et al. (1994) “Progress towards gene therapy for HIV infection”, Gene Ther. 1(1):13-26.
[0209] 44. Zetsche et al. (2015) “Cpf1 is a single RNA-guided endonuclease of a class 2 CRISPR-Cas system” Cell 163(3):759-71.
[0210] 45. Zuris et al. (2015) “Cationic lipid-mediated delivery of proteins enables efficient protein based genome editing in vitro and in vivo” Nat Biotechnol. 33(1):73-80

The application's sequence listing, which the Patent Office published only in electronic form, follows.

SEQUENCE LISTING (6224 sequences)

SEQ ID NO: 1 - RNA, 20 nt, synthetic construct
  source 1..20: mol_type = other RNA
aaccatcctggccgccagcc

SEQ ID NO: 2 - RNA, 20 nt, synthetic construct
  source 1..20: mol_type = other RNA
aactgggctggcggccagga

SEQ ID NO: 3 - RNA, 20 nt, synthetic construct
  source 1..20: mol_type = other RNA
aagaaccatcctggccgcca

SEQ ID NO: 4 - RNA, 20 nt, synthetic construct
  source 1..20: mol_type = other RNA
aaggcggcactctggtgggg

SEQ ID NO: 5 - RNA, 20 nt, synthetic construct
  source 1..20: mol_type = other RNA
acaactgggctggcggccag

SEQ ID NO: 6 - RNA, 20 nt, synthetic construct
  source 1..20: mol_type = other RNA
acacctgaccgccgacccca

SEQ ID NO: 7 - RNA, 20 nt, synthetic construct
  source 1..20: mol_type = other RNA
acaggcgccctggccagtcg

SEQ ID NO: 8 - RNA, 20 nt, synthetic construct
  source 1..20: mol_type = other RNA
accatcctggccgccagccc

SEQ ID NO: 9 - RNA, 20 nt, synthetic construct
  source 1..20: mol_type = other RNA
accccacctacctaagaacc

SEQ ID NO: 10 - RNA, 20 nt, synthetic construct
  source 1..20: mol_type = other RNA
accgcccagacgactggcca

SEQ ID NO: 11 - RNA, 20 nt, synthetic construct
  source 1..20: mol_type = other RNA
accgccgaccccacctacct

SEQ ID NO: 12 - RNA, 20 nt, synthetic construct
  source 1..20: mol_type = other RNA
acctaagaaccatcctggcc

SEQ ID NO: 13 - RNA, 20 nt, synthetic construct
  source 1..20: mol_type = other RNA
acctacctaagaaccatcct

SEQ ID NO: 14 - RNA, 20 nt, synthetic construct
  source 1..20: mol_type = other RNA
acctgaccgccgaccccacc

SEQ ID NO: 15 - RNA, 20 nt, synthetic construct
  source 1..20: mol_type = other RNA
acgactggccagggcgcctg

SEQ ID NO: 16 - RNA, 20 nt, synthetic construct
  source 1..20: mol_type = other RNA
actctggtggggctgctcca

SEQ ID NO: 17 - RNA, 20 nt, synthetic construct
  source 1..20: mol_type = other RNA
actggccagggcgcctgtgg

SEQ ID NO: 18 - RNA, 20 nt, synthetic construct
  source 1..20: mol_type = other RNA
actgggctggcggccaggat

SEQ ID NO: 19 - RNA, 20 nt, synthetic construct
  source 1..20: mol_type = other RNA
agaaccatcctggccgccag

SEQ ID NO: 20 - RNA, 20 nt, synthetic construct
  source 1..20: mol_type = other RNA
agaaggcggcactctggtgg

SEQ ID NO: 21 - RNA, 20 nt, synthetic construct
  source 1..20: mol_type = other RNA
agacgactggccagggcgcc

SEQ ID NO: 22 - RNA, 20 nt, synthetic construct
  source 1..20: mol_type = other RNA
agatcccacaggcgccctgg

SEQ ID NO: 23 - RNA, 20 nt, synthetic construct
  source 1..20: mol_type = other RNA
agcaccgcccagacgactgg

SEQ ID NO: 24 - RNA, 20 nt, synthetic construct
  source 1..20: mol_type = other RNA
agcagccccaccagagtgcc

SEQ ID NO: 25 - RNA, 20 nt, synthetic construct
  source 1..20: mol_type = other RNA
agcccagttgtagcaccgcc

SEQ ID NO: 26 - RNA, 20 nt, synthetic construct
  source 1..20: mol_type = other RNA
agccccaccagagtgccgcc

SEQ ID NO: 27 - RNA, 20 nt, synthetic construct
  source 1..20: mol_type = other RNA
aggatggttcttaggtaggt

SEQ ID NO: 28 - RNA, 20 nt, synthetic construct
  source 1..20: mol_type = other RNA
aggcatgcagatcccacagg

SEQ ID NO: 29 - RNA, 20 nt, synthetic construct
  source 1..20: mol_type = other RNA
aggcgccctggccagtcgtc

SEQ ID NO: 30 - RNA, 20 nt, synthetic construct
  source 1..20: mol_type = other RNA
aggcggcactctggtggggc

SEQ ID NO: 31 - RNA, 20 nt, synthetic construct
  source 1..20: mol_type = other RNA
agggcgcctgtgggatctgc

SEQ ID NO: 32 - RNA, 20 nt, synthetic construct
  source 1..20: mol_type = other RNA
aggtaggtggggtcggcggt

SEQ ID NO: 33 - RNA, 20 nt, synthetic construct
  source 1..20: mol_type = other RNA
aggtggggtcggcggtcagg

SEQ ID NO: 34 - RNA, 20 nt, synthetic construct
  source 1..20: mol_type = other RNA
agtcgtctgggcggtgctac

SEQ ID NO: 35 - RNA, 20 nt, synthetic construct
  source 1..20: mol_type = other RNA
agtggagaaggcggcactct

SEQ ID NO: 36 - RNA, 20 nt, synthetic construct
  source 1..20: mol_type = other RNA
agttgtagcaccgcccagac

SEQ ID NO: 37 - RNA, 20 nt, synthetic construct
  source 1..20: mol_type = other RNA
atcccacaggcgccctggcc

SEQ ID NO: 38 - RNA, 20 nt, synthetic construct
  source 1..20: mol_type = other RNA
atcctggccgccagcccagt

SEQ ID NO: 39 - RNA, 20 nt, synthetic construct
  source 1..20: mol_type = other RNA
atctgcatgcctggagcagc

SEQ ID NO: 40 - RNA, 20 nt, synthetic construct
  source 1..20: mol_type = other RNA
atgcagatcccacaggcgcc

SEQ ID NO: 41 - RNA, 20 nt, synthetic construct
  source 1..20: mol_type = other RNA
atgcctggagcagccccacc

SEQ ID NO: 42 - RNA, 20 nt, synthetic construct
  source 1..20: mol_type = other RNA
atggttcttaggtaggtggg

SEQ ID NO: 43 - RNA, 20 nt, synthetic construct
  source 1..20: mol_type = other RNA
caactgggctggcggccagg

SEQ ID NO: 44 - RNA, 20 nt, synthetic construct
  source 1..20: mol_type = other RNA
cacaggcgccctggccagtc

SEQ ID NO: 45 - RNA, 20 nt, synthetic construct
  source 1..20: mol_type = other RNA
caccgcccagacgactggcc

SEQ ID NO: 46 - RNA, 20 nt, synthetic construct
  source 1..20: mol_type = other RNA
cacctacctaagaaccatcc

SEQ ID NO: 47 - RNA, 20 nt, synthetic construct
  source 1..20: mol_type = other RNA
cacctgaccgccgaccccac

SEQ ID NO: 48 - RNA, 20 nt, synthetic construct
  source 1..20: mol_type = other RNA
cactctggtggggctgctcc

SEQ ID NO: 49 - RNA, 20 nt, synthetic construct
  source 1..20: mol_type = other RNA
cagacgactggccagggcgc

SEQ ID NO: 50 - RNA, 20 nt, synthetic construct
  source 1..20: mol_type = other RNA
cagatcccacaggcgccctg

SEQ ID NO: 51 - RNA, 20 nt, synthetic construct
  source 1..20: mol_type = other RNA
cagcccagttgtagcaccgc

SEQ ID NO: 52 - RNA, 20 nt, synthetic construct
  source 1..20: mol_type = other RNA
cagccccaccagagtgccgc

SEQ ID NO: 53 - RNA, 20 nt, synthetic construct
  source 1..20: mol_type = other RNA
caggatggttcttaggtagg

SEQ ID NO: 54 - RNA, 20 nt, synthetic construct
  source 1..20: mol_type = other RNA
caggcatgcagatcccacag

SEQ ID NO: 55 - RNA, 20 nt, synthetic construct
  source 1..20: mol_type = other RNA
caggcgccctggccagtcgt

SEQ ID NO: 56 - RNA, 20 nt, synthetic construct
  source 1..20: mol_type = other RNA
cagggcgcctgtgggatctg

SEQ ID NO: 57 - RNA, 20 nt, synthetic construct
  source 1..20: mol_type = other RNA
cagtcgtctgggcggtgcta

SEQ ID NO: 58 - RNA, 20 nt, synthetic construct
  source 1..20: mol_type = other RNA
cagttgtagcaccgcccaga

SEQ ID NO: 59 - RNA, 20 nt, synthetic construct
  source 1..20: mol_type = other RNA
catcctggccgccagcccag

SEQ ID NO: 60 - RNA, 20 nt, synthetic construct
  source 1..20: mol_type = other RNA
catgcagatcccacaggcgc

SEQ ID NO: 61 - RNA, 20 nt, synthetic construct
  source 1..20: mol_type = other RNA
catgcctggagcagccccac

SEQ ID NO: 62 - RNA, 20 nt, synthetic construct
  source 1..20: mol_type = other RNA
ccacaggcgccctggccagt

SEQ ID NO: 63 - RNA, 20 nt, synthetic construct
  source 1..20: mol_type = other RNA
ccacctacctaagaaccatc

SEQ ID NO: 64 - RNA, 20 nt, synthetic construct
  source 1..20: mol_type = other RNA
ccagacgactggccagggcg

SEQ ID NO: 65 - RNA, 20 nt, synthetic construct
  source 1..20: mol_type = other RNA
ccagcccagttgtagcaccg

SEQ ID NO: 66 - RNA, 20 nt, synthetic construct
  source 1..20: mol_type = other RNA
ccaggatggttcttaggtag

SEQ ID NO: 67 - RNA, 20 nt, synthetic construct
  source 1..20: mol_type = other RNA
ccaggcatgcagatcccaca

SEQ ID NO: 68 - RNA, 20 nt, synthetic construct
  source 1..20: mol_type = other RNA
ccagggcgcctgtgggatct

SEQ ID NO: 69 - RNA, 20 nt, synthetic construct
  source 1..20: mol_type = other RNA
ccagtcgtctgggcggtgct

SEQ ID NO: 70 - RNA, 20 nt, synthetic construct
  source 1..20: mol_type = other RNA
ccagttgtagcaccgcccag

SEQ ID NO: 71 - RNA, 20 nt, synthetic construct
  source 1..20: mol_type = other RNA
ccatcctggccgccagccca

SEQ ID NO: 72 - RNA, 20 nt, synthetic construct
  source 1..20: mol_type = other RNA
cccacaggcgccctggccag

SEQ ID NO: 73 - RNA, 20 nt, synthetic construct
  source 1..20: mol_type = other RNA
cccacctacctaagaaccat

SEQ ID NO: 74 - RNA, 20 nt, synthetic construct
  source 1..20: mol_type = other RNA
cccagacgactggccagggc

SEQ ID NO: 75 - RNA, 20 nt, synthetic construct
  source 1..20: mol_type = other RNA
cccagttgtagcaccgccca

SEQ ID NO: 76 - RNA, 20 nt, synthetic construct
  source 1..20: mol_type = other RNA
ccccacctacctaagaacca

SEQ ID NO: 77 - RNA, 20 nt, synthetic construct
  source 1..20: mol_type = other RNA
cccctggctctgggacacct

SEQ ID NO: 78 - RNA, 20 nt, synthetic construct
  source 1..20: mol_type = other RNA
ccctggccagtcgtctgggc

SEQ ID NO: 79 - RNA, 20 nt, synthetic construct
  source 1..20: mol_type = other RNA
ccctggctctgggacacctg

SEQ ID NO: 80 - RNA, 20 nt, synthetic construct
  source 1..20: mol_type = other RNA
ccgaccccacctacctaaga

SEQ ID NO: 81 - RNA, 20 nt, synthetic construct
  source 1..20: mol_type = other RNA
ccgccagcccagttgtagca

SEQ ID NO: 82 - RNA, 20 nt, synthetic construct
  source 1..20: mol_type = other RNA
ccgcccagacgactggccag

SEQ ID NO: 83 - RNA, 20 nt, synthetic construct
  source 1..20: mol_type = other RNA
ccgccgaccccacctaccta

SEQ ID NO: 84 - RNA, 20 nt, synthetic construct
  source 1..20: mol_type = other RNA
cctaagaaccatcctggccg

SEQ ID NO: 85 - RNA, 20 nt, synthetic construct
  source 1..20: mol_type = other RNA
cctacctaagaaccatcctg

SEQ ID NO: 86 - RNA, 20 nt, synthetic construct
  source 1..20: mol_type = other RNA
cctgaccgccgaccccacct

SEQ ID NO: 87 - RNA, 20 nt, synthetic construct
  source 1..20: mol_type = other RNA
cctggagcagccccaccaga

SEQ ID NO: 88 - RNA, 20 nt, synthetic construct
  source 1..20: mol_type = other RNA
cctggccagtcgtctgggcg

SEQ ID NO: 89 - RNA, 20 nt, synthetic construct
  source 1..20: mol_type = other RNA
cctggccgccagcccagttg

SEQ ID NO: 90 - RNA, 20 nt, synthetic construct
  source 1..20: mol_type = other RNA
cctggctctgggacacctga

SEQ ID NO: 91 - RNA, 20 nt, synthetic construct
  source 1..20: mol_type = other RNA
cctgtgggatctgcatgcct

SEQ ID NO: 92 - RNA, 20 nt, synthetic construct
  source 1..20: mol_type = other RNA
cgaccccacctacctaagaa

SEQ ID NO: 93 - RNA, 20 nt, synthetic construct
  source 1..20: mol_type = other RNA
cgactggccagggcgcctgt

SEQ ID NO: 94 - RNA, 20 nt, synthetic construct
  source 1..20: mol_type = other RNA
cgccagcccagttgtagcac

SEQ ID NO: 95 - RNA, 20 nt, synthetic construct
  source 1..20: mol_type = other RNA
cgcccagacgactggccagg

SEQ ID NO: 96 - RNA, 20 nt, synthetic construct
  source 1..20: mol_type = other RNA
cgccctggccagtcgtctgg

SEQ ID NO: 97 - RNA, 20 nt, synthetic construct
  source 1..20: mol_type = other RNA
cgccgaccccacctacctaa

SEQ ID NO: 98 - RNA, 20 nt, synthetic construct
  source 1..20: mol_type = other RNA
cgcctgtgggatctgcatgc

SEQ ID NO: 99 - RNA, 20 nt, synthetic construct
  source 1..20: mol_type = other RNA
cggcactctggtggggctgc

SEQ ID NO: 100 - RNA, 20 nt, synthetic construct
  source 1..20: mol_type = other RNA
cggccaggatggttcttagg

SEQ ID NO: 101 - RNA, 20 nt, synthetic construct
  source 1..20: mol_type = other RNA
cggcggtcaggtgtcccaga

SEQ ID NO: 102 - RNA, 20 nt, synthetic construct
  source 1..20: mol_type = other RNA
cggtgctacaactgggctgg

SEQ ID NO: 103 - RNA, 20 nt, synthetic construct
  source 1..20: mol_type = other RNA
cgtctgggcggtgctacaac

SEQ ID NO: 104 - RNA, 20 nt, synthetic construct
  source 1..20: mol_type = other RNA
ctaagaaccatcctggccgc

SEQ ID NO: 105 - RNA, 20 nt, synthetic construct
  source 1..20: mol_type = other RNA
ctacaactgggctggcggcc

SEQ ID NO: 106 - RNA, 20 nt, synthetic construct
  source 1..20: mol_type = other RNA
ctacctaagaaccatcctgg

SEQ ID NO: 107 - RNA, 20 nt, synthetic construct
  source 1..20: mol_type = other RNA
ctccaggcatgcagatccca

SEQ ID NO: 108 - RNA, 20 nt, synthetic construct
  source 1..20: mol_type = other RNA
ctctgggacacctgaccgcc

SEQ ID NO: 109 - RNA, 20 nt, synthetic construct
  source 1..20: mol_type = other RNA
ctctggtggggctgctccag

SEQ ID NO: 110 - RNA, 20 nt, synthetic construct
  source 1..20: mol_type = other RNA
ctgaccgccgaccccaccta

SEQ ID NO: 111 - RNA, 20 nt, synthetic construct
  source 1..20: mol_type = other RNA
ctgcatgcctggagcagccc

SEQ ID NO: 112 - RNA, 20 nt, synthetic construct
  source 1..20: mol_type = other RNA
ctgctccaggcatgcagatc

SEQ ID NO: 113 - RNA, 20 nt, synthetic construct
  source 1..20: mol_type = other RNA
ctggagcagccccaccagag

SEQ ID NO: 114 - RNA, 20 nt, synthetic construct
  source 1..20: mol_type = other RNA
ctggccagggcgcctgtggg

SEQ ID NO: 115 - RNA, 20 nt, synthetic construct
  source 1..20: mol_type = other RNA
ctggccagtcgtctgggcgg

SEQ ID NO: 116 - RNA, 20 nt, synthetic construct
  source 1..20: mol_type = other RNA
ctggccgccagcccagttgt

SEQ ID NO: 117 - RNA, 20 nt, synthetic construct
  source 1..20: mol_type = other RNA
ctggcggccaggatggttct

SEQ ID NO: 118 - RNA, 20 nt, synthetic construct
  source 1..20: mol_type = other RNA
ctggctctgggacacctgac

SEQ ID NO: 119 - RNA, 20 nt, synthetic construct
  source 1..20: mol_type = other RNA
ctgggacacctgaccgccga

SEQ ID NO: 120 - RNA, 20 nt, synthetic construct
  source 1..20: mol_type = other RNA
ctgggcggtgctacaactgg

SEQ ID NO: 121 - RNA, 20 nt, synthetic construct
  source 1..20: mol_type = other RNA
ctgggctggcggccaggatg

SEQ ID NO: 122 - RNA, 20 nt, synthetic construct
  source 1..20: mol_type = other RNA
ctggtggggctgctccaggc

SEQ ID NO: 123 - RNA, 20 nt, synthetic construct
  source 1..20: mol_type = other RNA
ctgtgggatctgcatgcctg

SEQ ID NO: 124 - RNA, 20 nt, synthetic construct
  source 1..20: mol_type = other RNA
cttaggtaggtggggtcggc

SEQ ID NO: 125 - RNA, 20 nt, synthetic construct
  source 1..20: mol_type = other RNA
gaaccatcctggccgccagc

SEQ ID NO: 126 - RNA, 20 nt, synthetic construct
  source 1..20: mol_type = other RNA
gaaggcggcactctggtggg

SEQ ID NO: 127 - RNA, 20 nt, synthetic construct
  source 1..20: mol_type = other RNA
gacacctgaccgccgacccc

SEQ ID NO: 128 - RNA, 20 nt, synthetic construct
  source 1..20: mol_type = other RNA
gaccccacctacctaagaac

SEQ ID NO: 129 - RNA, 20 nt, synthetic construct
  source 1..20: mol_type = other RNA
gaccgccgaccccacctacc

SEQ ID NO: 130 - RNA, 20 nt, synthetic construct
  source 1..20: mol_type = other RNA
gacgactggccagggcgcct

SEQ ID NO: 131 - RNA, 20 nt, synthetic construct
  source 1..20: mol_type = other RNA
gactggccagggcgcctgtg

SEQ ID NO: 132 - RNA, 20 nt, synthetic construct
  source 1..20: mol_type = other RNA
gagaaggcggcactctggtg

SEQ ID NO: 133 - RNA, 20 nt, synthetic construct
  source 1..20: mol_type = other RNA
gagcagccccaccagagtgc

SEQ ID NO: 134 - RNA, 20 nt, synthetic construct
  source 1..20: mol_type = other RNA
gatcccacaggcgccctggc

SEQ ID NO: 135 - RNA, 20 nt, synthetic construct
  source 1..20: mol_type = other RNA
gatctgcatgcctggagcag

SEQ ID NO: 136 - RNA, 20 nt, synthetic construct
  source 1..20: mol_type = other RNA
gatggttcttaggtaggtgg

SEQ ID NO: 137 - RNA, 20 nt, synthetic construct
  source 1..20: mol_type = other RNA
gcaccgcccagacgactggc

SEQ ID NO: 138 - RNA, 20 nt, synthetic construct
  source 1..20: mol_type = other RNA
gcactctggtggggctgctc

SEQ ID NO: 139 - RNA, 20 nt, synthetic construct
  source 1..20: mol_type = other RNA
gcagatcccacaggcgccct

SEQ ID NO: 140 - RNA, 20 nt, synthetic construct
  source 1..20: mol_type = other RNA
gcagccccaccagagtgccg

SEQ ID NO: 141 - RNA, 20 nt, synthetic construct
  source 1..20: mol_type = other RNA
gcatgcagatcccacaggcg

SEQ ID NO: 142 - RNA, 20 nt, synthetic construct
  source 1..20: mol_type = other RNA
gcatgcctggagcagcccca

SEQ ID NO: 143 - RNA, 20 nt, synthetic construct
  source 1..20: mol_type = other RNA
gccagcccagttgtagcacc

SEQ ID NO: 144 - RNA, 20 nt, synthetic construct
  source 1..20: mol_type = other RNA
gccaggatggttcttaggta

SEQ ID NO: 145 - RNA, 20 nt, synthetic construct
  source 1..20: mol_type = other RNA
gccagggcgcctgtgggatc

SEQ ID NO: 146 - RNA, 20 nt, synthetic construct
  source 1..20: mol_type = other RNA
gccagtcgtctgggcggtgc

SEQ ID NO: 147 - RNA, 20 nt, synthetic construct
  source 1..20: mol_type = other RNA
gcccagacgactggccaggg

SEQ ID NO: 148 - RNA, 20 nt, synthetic construct
  source 1..20: mol_type = other RNA
gcccagttgtagcaccgccc

SEQ ID NO: 149 - RNA, 20 nt, synthetic construct
  source 1..20: mol_type = other RNA
gccccaccagagtgccgcct

SEQ ID NO: 150 - RNA, 20 nt, synthetic construct
  source 1..20: mol_type = other RNA
gccctggccagtcgtctggg

SEQ ID NO: 151 - RNA, 20 nt, synthetic construct
  source 1..20: mol_type = other RNA
gccgaccccacctacctaag

SEQ ID NO: 152 - RNA, 20 nt, synthetic construct
  source 1..20: mol_type = other RNA
gccgccagcccagttgtagc

SEQ ID NO: 153 - RNA, 20 nt, synthetic construct
  source 1..20: mol_type = other RNA
gcctggagcagccccaccag

SEQ ID NO: 154 - RNA, 20 nt, synthetic construct
  source 1..20: mol_type = other RNA
gcctgtgggatctgcatgcc

SEQ ID NO: 155 - RNA, 20 nt, synthetic construct
  source 1..20: mol_type = other RNA
gcgccctggccagtcgtctg

SEQ ID NO: 156 - RNA, 20 nt, synthetic construct
  source 1..20: mol_type = other RNA
gcgcctgtgggatctgcatg

SEQ ID NO: 157 - RNA, 20 nt, synthetic construct
  source 1..20: mol_type = other RNA
gcggcactctggtggggctg

SEQ ID NO: 158 - RNA, 20 nt, synthetic construct
  source 1..20: mol_type = other RNA
gcggccaggatggttcttag

SEQ ID NO: 159 - RNA, 20 nt, synthetic construct
  source 1..20: mol_type = other RNA
gcggtgctacaactgggctg

SEQ ID NO: 160 - RNA, 20 nt, synthetic construct
  source 1..20: mol_type = other RNA
gctacaactgggctggcggc

SEQ ID NO: 161 - RNA, 20 nt, synthetic construct
  source 1..20: mol_type = other RNA
gctccaggcatgcagatccc

SEQ ID NO: 162 - RNA, 20 nt, synthetic construct
  source 1..20: mol_type = other RNA
gctctgggacacctgaccgc

SEQ ID NO: 163 - RNA, 20 nt, synthetic construct
  source 1..20: mol_type = other RNA
gctgctccaggcatgcagat

SEQ ID NO: 164 - RNA, 20 nt, synthetic construct
  source 1..20: mol_type = other RNA
gctggcggccaggatggttc

SEQ ID NO: 165 - RNA, 20 nt, synthetic construct
  source 1..20: mol_type = other RNA
ggacacctgaccgccgaccc

SEQ ID NO: 166 - RNA, 20 nt, synthetic construct
  source 1..20: mol_type = other RNA
ggagaaggcggcactctggt

SEQ ID NO: 167 - RNA, 20 nt, synthetic construct
  source 1..20: mol_type = other RNA
ggagcagccccaccagagtg

SEQ ID NO: 168 - RNA, 20 nt, synthetic construct
  source 1..20: mol_type = other RNA
ggatctgcatgcctggagca

SEQ ID NO: 169 - RNA, 20 nt, synthetic construct
  source 1..20: mol_type = other RNA
ggatggttcttaggtaggtg

SEQ ID NO: 170 - RNA, 20 nt, synthetic construct
  source 1..20: mol_type = other RNA
ggcactctggtggggctgct

SEQ ID NO: 171 - RNA, 20 nt, synthetic construct
  source 1..20: mol_type = other RNA
ggcatgcagatcccacaggc

SEQ ID NO: 172 - RNA, 20 nt, synthetic construct
  source 1..20: mol_type = other RNA
ggccaggatggttcttaggt

SEQ ID NO: 173 - RNA, 20 nt, synthetic construct
  source 1..20: mol_type = other RNA
ggccagggcgcctgtgggat

SEQ ID NO: 174 - RNA, 20 nt, synthetic construct
  source 1..20: mol_type = other RNA
ggccagtcgtctgggcggtg

SEQ ID NO: 175 - RNA, 20 nt, synthetic construct
  source 1..20: mol_type = other RNA
ggccgccagcccagttgtag

SEQ ID NO: 176 - RNA, 20 nt, synthetic construct
  source 1..20: mol_type = other RNA
ggcgccctggccagtcgtct

SEQ ID NO: 177 - RNA, 20 nt, synthetic construct
  source 1..20: mol_type = other RNA
ggcgcctgtgggatctgcat

SEQ ID NO: 178 - RNA, 20 nt, synthetic construct
  source 1..20: mol_type = other RNA
ggcggcactctggtggggct

SEQ ID NO: 179 - RNA, 20 nt, synthetic construct
  source 1..20: mol_type = other RNA
ggcggccaggatggttctta

SEQ ID NO: 180 - RNA, 20 nt, synthetic construct
  source 1..20: mol_type = other RNA
ggcggtgctacaactgggct

SEQ ID NO: 181 - RNA, 20 nt, synthetic construct
  source 1..20: mol_type = other RNA
ggctctgggacacctgaccg

SEQ ID NO: 182 - RNA, 20 nt, synthetic construct
  source 1..20: mol_type = other RNA
ggctgctccaggcatgcaga

SEQ ID NO: 183 - RNA, 20 nt, synthetic construct
  source 1..20: mol_type = other RNA
ggctggcggccaggatggtt

SEQ ID NO: 184 - RNA, 20 nt, synthetic construct
  source 1..20: mol_type = other RNA
gggacacctgaccgccgacc

SEQ ID NO: 185 - RNA, 20 nt, synthetic construct
  source 1..20: mol_type = other RNA
gggatctgcatgcctggagc

SEQ ID NO: 186 - RNA, 20 nt, synthetic construct
  source 1..20: mol_type = other RNA
gggcgcctgtgggatctgca

SEQ ID NO: 187 - RNA, 20 nt, synthetic construct
  source 1..20: mol_type = other RNA
gggcggtgctacaactgggc

SEQ ID NO: 188 - RNA, 20 nt, synthetic construct
  source 1..20: mol_type = other RNA
gggctgctccaggcatgcag

SEQ ID NO: 189 - RNA, 20 nt, synthetic construct
  source 1..20: mol_type = other RNA
gggctggcggccaggatggt

SEQ ID NO: 190 - RNA, 20 nt, synthetic construct
  source 1..20: mol_type = other RNA
ggggctgctccaggcatgca

SEQ ID NO: 191 - RNA, 20 nt, synthetic construct
  source 1..20: mol_type = other RNA
ggggtcggcggtcaggtgtc

SEQ ID NO: 192 - RNA, 20 nt, synthetic construct
  source 1..20: mol_type = other RNA
gggtcggcggtcaggtgtcc

SEQ ID NO: 193 - RNA, 20 nt, synthetic construct
  source 1..20: mol_type = other RNA
ggtaggtggggtcggcggtc

SEQ ID NO: 194 - RNA, 20 nt, synthetic construct
  source 1..20: mol_type = other RNA
ggtcggcggtcaggtgtccc

SEQ ID NO: 195 - RNA, 20 nt, synthetic construct
  source 1..20: mol_type = other RNA
ggtgctacaactgggctggc

SEQ ID NO: 196 - RNA, 20 nt, synthetic construct
  source 1..20: mol_type = other RNA
ggtggggctgctccaggcat

SEQ ID NO: 197 - RNA, 20 nt, synthetic construct
  source 1..20: mol_type = other RNA
ggtggggtcggcggtcaggt

SEQ ID NO: 198 - RNA, 20 nt, synthetic construct
  source 1..20: mol_type = other RNA
ggttcttaggtaggtggggt

SEQ ID NO: 199 - RNA, 20 nt, synthetic construct
  source 1..20: mol_type = other RNA
gtagcaccgcccagacgact

SEQ ID NO: 200 - RNA, 20 nt, synthetic construct
  source 1..20: mol_type = other RNA
gtaggtggggtcggcggtca

SEQ ID NO: 201 - RNA, 20 nt, synthetic construct
  source 1..20: mol_type = other RNA
gtcggcggtcaggtgtccca

SEQ ID NO: 202 - RNA, 20 nt, synthetic construct
  source 1..20: mol_type = other RNA
gtcgtctgggcggtgctaca

SEQ ID NO: 203 - RNA, 20 nt, synthetic construct
  source 1..20: mol_type = other RNA
gtctgggcggtgctacaact

SEQ ID NO: 204 - RNA, 20 nt, synthetic construct
  source 1..20: mol_type = other RNA
gtgctacaactgggctggcg

SEQ ID NO: 205 - RNA, 20 nt, synthetic construct
  source 1..20: mol_type = other RNA
gtggagaaggcggcactctg

SEQ ID NO: 206 - RNA, 20 nt, synthetic construct
  source 1..20: mol_type = other RNA
gtgggatctgcatgcctgga

SEQ ID NO: 207 - RNA, 20 nt, synthetic construct
  source 1..20: mol_type = other RNA
gtggggctgctccaggcatg

SEQ ID NO: 208 - RNA, 20 nt, synthetic construct
  source 1..20: mol_type = other RNA
gtggggtcggcggtcaggtg

SEQ ID NO: 209 - RNA, 20 nt, synthetic construct
  source 1..20: mol_type = other RNA
gttcttaggtaggtggggtc

SEQ ID NO: 210 - RNA, 20 nt, synthetic construct
  source 1..20: mol_type = other RNA
gttgtagcaccgcccagacg

SEQ ID NO: 211 - RNA, 20 nt, synthetic construct
  source 1..20: mol_type = other RNA
taagaaccatcctggccgcc

SEQ ID NO: 212 - RNA, 20 nt, synthetic construct
  source 1..20: mol_type = other RNA
tacaactgggctggcggcca

SEQ ID NO: 213 - RNA, 20 nt, synthetic construct
  source 1..20: mol_type = other RNA
tacctaagaaccatcctggc

SEQ ID NO: 214 - RNA, 20 nt, synthetic construct
  source 1..20: mol_type = other RNA
tagcaccgcccagacgactg

SEQ ID NO: 215 - RNA, 20 nt, synthetic construct
  source 1..20: mol_type = other RNA
taggtaggtggggtcggcgg

SEQ ID NO: 216 - RNA, 20 nt, synthetic construct
  source 1..20: mol_type = other RNA
taggtggggtcggcggtcag

SEQ ID NO: 217 - RNA, 20 nt, synthetic construct
  source 1..20: mol_type = other RNA
tccaggcatgcagatcccac

SEQ ID NO: 218 - RNA, 20 nt, synthetic construct
  source 1..20: mol_type = other RNA
tcccacaggcgccctggcca

SEQ ID NO: 219 - RNA, 20 nt, synthetic construct
  source 1..20: mol_type = other RNA
tcctggccgccagcccagtt

SEQ ID NO: 220 - RNA, 20 nt, synthetic construct
  source 1..20: mol_type = other RNA
tcggcggtcaggtgtcccag

SEQ ID NO: 221 - RNA, 20 nt, synthetic construct
  source 1..20: mol_type = other RNA
tcgtctgggcggtgctacaa

SEQ ID NO: 222 - RNA, 20 nt, synthetic construct
  source 1..20: mol_type = other RNA
tctgcatgcctggagcagcc

SEQ ID NO: 223 - RNA, 20 nt, synthetic construct
  source 1..20: mol_type = other RNA
tctgggacacctgaccgccg

SEQ ID NO: 224 - RNA, 20 nt, synthetic construct
  source 1..20: mol_type = other RNA
tctgggcggtgctacaactg

SEQ ID NO: 225 - RNA, 20 nt, synthetic construct
  source 1..20: mol_type = other RNA
tctggtggggctgctccagg

SEQ ID NO: 226 - RNA, 20 nt, synthetic construct
  source 1..20: mol_type = other RNA
tcttaggtaggtggggtcgg

SEQ ID NO: 227 - RNA, 20 nt, synthetic construct
  source 1..20: mol_type = other RNA
tgaccgccgaccccacctac

SEQ ID NO: 228 - RNA, 20 nt, synthetic construct
  source 1..20: mol_type = other RNA
tgcagatcccacaggcgccc

SEQ ID NO: 229 - RNA, 20 nt, synthetic construct
  source 1..20: mol_type = other RNA
tgcatgcctggagcagcccc

SEQ ID NO: 230 - RNA, 20 nt, synthetic construct
  source 1..20: mol_type = other RNA
tgcctggagcagccccacca

SEQ ID NO: 231 - RNA, 20 nt, synthetic construct
  source 1..20: mol_type = other RNA
tgctacaactgggctggcgg

SEQ ID NO: 232 - RNA, 20 nt, synthetic construct
  source 1..20: mol_type = other RNA
tgctccaggcatgcagatcc

SEQ ID NO: 233 - RNA, 20 nt, synthetic construct
  source 1..20: mol_type = other RNA
tggagaaggcggcactctgg

SEQ ID NO: 234 - RNA, 20 nt, synthetic construct
  source 1..20: mol_type = other RNA
tggagcagccccaccagagt

SEQ ID NO: 235 - RNA, 20 nt, synthetic construct
  source 1..20: mol_type = other RNA
tggccagggcgcctgtggga

SEQ ID NO: 236 - RNA, 20 nt, synthetic construct
  source 1..20: mol_type = other RNA
tggccagtcgtctgggcggt

SEQ ID NO: 237 - RNA, 20 nt, synthetic construct
  source 1..20: mol_type = other RNA
tggccgccagcccagttgta

SEQ ID NO: 238 - RNA, 20 nt, synthetic construct
  source 1..20: mol_type = other RNA
tggcggccaggatggttctt

SEQ ID NO: 239 - RNA, 20 nt, synthetic construct
  source 1..20: mol_type = other RNA
tggctctgggacacctgacc

SEQ ID NO: 240 - RNA, 20 nt, synthetic construct
  source 1..20: mol_type = other RNA
tgggacacctgaccgccgac

SEQ ID NO: 241 - RNA, 20 nt, synthetic construct
  source 1..20: mol_type = other RNA
tgggatctgcatgcctggag

SEQ ID NO: 242 - RNA, 20 nt, synthetic construct
  source 1..20: mol_type = other RNA
tgggcggtgctacaactggg

SEQ ID NO: 243 - RNA, 20 nt, synthetic construct
  source 1..20: mol_type = other RNA
tgggctggcggccaggatgg

SEQ ID NO: 244 - RNA, 20 nt, synthetic construct
  source 1..20: mol_type = other RNA
tggggctgctccaggcatgc

SEQ ID NO: 245 - RNA, 20 nt, synthetic construct
  source 1..20: mol_type = other RNA
tggggtcggcggtcaggtgt

SEQ ID NO: 246 - RNA, 20 nt, synthetic construct
  source 1..20: mol_type = other RNA
tggtggggctgctccaggca

SEQ ID NO: 247 - RNA, 20 nt, synthetic construct
  source 1..20: mol_type = other RNA
tggttcttaggtaggtgggg

SEQ ID NO: 248 - RNA, 20 nt, synthetic construct
  source 1..20: mol_type = other RNA
tgtagcaccgcccagacgac

SEQ ID NO: 249 - RNA, 20 nt, synthetic construct
  source 1..20: mol_type = other RNA
tgtgggatctgcatgcctgg

SEQ ID NO: 250 - RNA, 20 nt, synthetic construct
  source 1..20: mol_type = other RNA
ttaggtaggtggggtcggcg

SEQ ID NO: 251 - RNA, 20 nt, synthetic construct
  source 1..20: mol_type = other RNA
ttcttaggtaggtggggtcg

SEQ ID NO: 252 - RNA, 20 nt, synthetic construct
  source 1..20: mol_type = other RNA
ttgtagcaccgcccagacga

SEQ ID NO: 253 - RNA, 21 nt, synthetic construct
  source 1..21: mol_type = other RNA
aaccatcctggccgccagccc

SEQ ID NO: 254 - RNA, 21 nt, synthetic construct
  source 1..21: mol_type = other RNA
aactgggctggcggccaggat

SEQ ID NO: 255 - RNA, 21 nt, synthetic construct
  source 1..21: mol_type = other RNA
aagaaccatcctggccgccag

SEQ ID NO: 256 - RNA, 21 nt, synthetic construct
  source 1..21: mol_type = other RNA
aaggcggcactctggtggggc

SEQ ID NO: 257 - RNA, 21 nt, synthetic construct
  source 1..21: mol_type = other RNA
acaactgggctggcggccagg

SEQ ID NO: 258 - RNA, 21 nt, synthetic construct
  source 1..21: mol_type = other RNA
acacctgaccgccgaccccac

SEQ ID NO: 259 - RNA, 21 nt, synthetic construct
  source 1..21: mol_type = other RNA
acaggcgccctggccagtcgt

SEQ ID NO: 260 - RNA, 21 nt, synthetic construct
  source 1..21: mol_type = other RNA
accatcctggccgccagccca

SEQ ID NO: 261 - RNA, 21 nt, synthetic construct
  source 1..21: mol_type = other RNA
accccacctacctaagaacca

SEQ ID NO: 262 - RNA, 21 nt, synthetic construct
  source 1..21: mol_type = other RNA
accgcccagacgactggccag

SEQ ID NO: 263 - RNA, 21 nt, synthetic construct
  source 1..21: mol_type = other RNA
accgccgaccccacctaccta

SEQ ID NO: 264 - RNA, 21 nt, synthetic construct
  source 1..21: mol_type = other RNA
acctaagaaccatcctggccg

SEQ ID NO: 265 - RNA, 21 nt, synthetic construct
  source 1..21: mol_type = other RNA
acctacctaagaaccatcctg

SEQ ID NO: 266 - RNA, 21 nt, synthetic construct
  source 1..21: mol_type = other RNA
acctgaccgccgaccccacct

SEQ ID NO: 267 - RNA, 21 nt, synthetic construct
  source 1..21: mol_type = other RNA
acgactggccagggcgcctgt

SEQ ID NO: 268 - RNA, 21 nt, synthetic construct
  source 1..21: mol_type = other RNA
actctggtggggctgctccag

SEQ ID NO: 269 - RNA, 21 nt, synthetic construct
  source 1..21: mol_type = other RNA
actggccagggcgcctgtggg

SEQ ID NO: 270 - RNA, 21 nt, synthetic construct
  source 1..21: mol_type = other RNA
actgggctggcggccaggatg

SEQ ID NO: 271 - RNA, 21 nt, synthetic construct
  source 1..21: mol_type = other RNA
agaaccatcctggccgccagc

SEQ ID NO: 272 - RNA, 21 nt, synthetic construct
  source 1..21: mol_type = other RNA
agaaggcggcactctggtggg

SEQ ID NO: 273 - RNA, 21 nt, synthetic construct
  source 1..21: mol_type = other RNA
agacgactggccagggcgcct

SEQ ID NO: 274 - RNA, 21 nt, synthetic construct
  source 1..21: mol_type = other RNA
agatcccacaggcgccctggc

SEQ ID NO: 275 - RNA, 21 nt, synthetic construct
  source 1..21: mol_type = other RNA
agcaccgcccagacgactggc

SEQ ID NO: 276 - RNA, 21 nt, synthetic construct
  source 1..21: mol_type = other RNA
agcagccccaccagagtgccg

SEQ ID NO: 277 - RNA, 21 nt, synthetic construct
  source 1..21: mol_type = other RNA
agcccagttgtagcaccgccc

SEQ ID NO: 278 - RNA, 21 nt, synthetic construct
  source 1..21: mol_type = other RNA
agccccaccagagtgccgcct

SEQ ID NO: 279 - RNA, 21 nt, synthetic construct
  source 1..21: mol_type = other RNA
aggatggttcttaggtaggtg

SEQ ID NO: 280 - RNA, 21 nt, synthetic construct
  source 1..21: mol_type = other RNA
aggcatgcagatcccacaggc

SEQ ID NO: 281 - RNA, 21 nt, synthetic construct
  source 1..21: mol_type = other RNA
aggcgccctggccagtcgtct

SEQ ID NO: 282 - RNA, 21 nt, synthetic construct
  source 1..21: mol_type = other RNA
aggcggcactctggtggggct

SEQ ID NO: 283 - RNA, 21 nt, synthetic construct
  source 1..21: mol_type = other RNA
agggcgcctgtgggatctgca

SEQ ID NO: 284 - RNA, 21 nt, synthetic construct
  source 1..21: mol_type = other RNA
aggtaggtggggtcggcggtc

SEQ ID NO: 285 - RNA, 21 nt, synthetic construct
  source 1..21: mol_type = other RNA
aggtggggtcggcggtcaggt

SEQ ID NO: 286 - RNA, 21 nt, synthetic construct
  source 1..21: mol_type = other RNA
agtcgtctgggcggtgctaca

SEQ ID NO: 287 - RNA, 21 nt, synthetic construct
  source 1..21: mol_type = other RNA
agtggagaaggcggcactctg

SEQ ID NO: 288 - RNA, 21 nt, synthetic construct
  source 1..21: mol_type = other RNA
agttgtagcaccgcccagacg

SEQ ID NO: 289 - RNA, 21 nt, synthetic construct
  source 1..21: mol_type = other RNA
atcccacaggcgccctggcca

SEQ ID NO: 290 - RNA, 21 nt, synthetic construct
  source 1..21: mol_type = other RNA
atcctggccgccagcccagtt

SEQ ID NO: 291 - RNA, 21 nt, synthetic construct
  source 1..21: mol_type = other RNA
atctgcatgcctggagcagcc

SEQ ID NO: 292 - RNA, 21 nt, synthetic construct
  source 1..21: mol_type = other RNA
atgcagatcccacaggcgccc

SEQ ID NO: 293 - RNA, 21 nt, synthetic construct
  source 1..21: mol_type = other RNA
atgcctggagcagccccacca

SEQ ID NO: 294 - RNA, 21 nt, synthetic construct
  source 1..21: mol_type = other RNA
atggttcttaggtaggtgggg

SEQ ID NO: 295 - RNA, 21 nt, synthetic construct
  source 1..21: mol_type = other RNA
caactgggctggcggccagga

SEQ ID NO: 296 - RNA, 21 nt, synthetic construct
  source 1..21: mol_type = other RNA
cacaggcgccctggccagtcg

SEQ ID NO: 297 - RNA, 21 nt, synthetic construct
  source 1..21: mol_type = other RNA
caccgcccagacgactggcca

SEQ ID NO: 298 - RNA, 21 nt, synthetic construct
  source 1..21: mol_type = other RNA
cacctacctaagaaccatcct

SEQ ID NO: 299 - RNA, 21 nt, synthetic construct
  source 1..21: mol_type = other RNA
cacctgaccgccgaccccacc

SEQ ID NO: 300 - RNA, 21 nt, synthetic construct
  source 1..21: mol_type = other RNA
cactctggtggggctgctcca

SEQ ID NO: 301 - RNA, 21 nt, synthetic construct
  source 1..21: mol_type = other RNA
cagacgactggccagggcgcc

SEQ ID NO: 302 - RNA, 21 nt, synthetic construct
  source 1..21: mol_type = other RNA
cagatcccacaggcgccctgg

SEQ ID NO: 303 - RNA, 21 nt, synthetic construct
  source 1..21: mol_type = other RNA
cagcccagttgtagcaccgcc

SEQ ID NO: 304 - RNA, 21 nt, synthetic construct
  source 1..21: mol_type = other RNA
cagccccaccagagtgccgcc

SEQ ID NO: 305 - RNA, 21 nt, synthetic construct
  source 1..21: mol_type = other RNA
caggatggttcttaggtaggt

SEQ ID NO: 306 - RNA, 21 nt, synthetic construct
  source 1..21: mol_type = other RNA
caggcatgcagatcccacagg

SEQ ID NO: 307 - RNA, 21 nt, synthetic construct
  source 1..21: mol_type = other RNA
caggcgccctggccagtcgtc

SEQ ID NO: 308 - RNA, 21 nt, synthetic construct
  source 1..21: mol_type = other RNA
cagggcgcctgtgggatctgc

SEQ ID NO: 309 - RNA, 21 nt, synthetic construct
  source 1..21: mol_type = other RNA
cagtcgtctgggcggtgctac

SEQ ID NO: 310 - RNA, 21 nt, synthetic construct
  source 1..21: mol_type = other RNA
cagttgtagcaccgcccagac

SEQ ID NO: 311 - RNA, 21 nt, synthetic construct
  source 1..21: mol_type = other RNA
catcctggccgccagcccagt

SEQ ID NO: 312 - RNA, 21 nt, synthetic construct
  source 1..21: mol_type = other RNA
catgcagatcccacaggcgcc

SEQ ID NO: 313 - RNA, 21 nt, synthetic construct
  source 1..21: mol_type = other RNA
catgcctggagcagccccacc

SEQ ID NO: 314 - RNA, 21 nt, synthetic construct
  source 1..21: mol_type = other RNA
ccacaggcgccctggccagtc

SEQ ID NO: 315 - RNA, 21 nt, synthetic construct
  source 1..21: mol_type = other RNA
ccacctacctaagaaccatcc

SEQ ID NO: 316 - RNA, 21 nt, synthetic construct
  source 1..21: mol_type = other RNA
ccagacgactggccagggcgc

SEQ ID NO: 317 - RNA, 21 nt, synthetic construct
  source 1..21: mol_type = other RNA
ccagcccagttgtagcaccgc

SEQ ID NO: 318 - RNA, 21 nt, synthetic construct
  source 1..21: mol_type = other RNA
ccaggatggttcttaggtagg

SEQ ID NO: 319 - RNA, 21 nt, synthetic construct
  source 1..21: mol_type = other RNA
ccaggcatgcagatcccacag

SEQ ID NO: 320 - RNA, 21 nt, synthetic construct
  source 1..21: mol_type = other RNA
ccagggcgcctgtgggatctg

SEQ ID NO: 321 - RNA, 21 nt, synthetic construct
  source 1..21: mol_type = other RNA
ccagtcgtctgggcggtgcta

SEQ ID NO: 322 - RNA, 21 nt, synthetic construct
  source 1..21: mol_type = other RNA
ccagttgtagcaccgcccaga

SEQ ID NO: 323 - RNA, 21 nt, synthetic construct
  source 1..21: mol_type = other RNA
ccatcctggccgccagcccag

SEQ ID NO: 324 - RNA, 21 nt, synthetic construct
  source 1..21: mol_type = other RNA
cccacaggcgccctggccagt

SEQ ID NO: 325 - RNA, 21 nt, synthetic construct
  source 1..21: mol_type = other RNA
cccacctacctaagaaccatc

SEQ ID NO: 326 - RNA, 21 nt, synthetic construct
  source 1..21: mol_type = other RNA
cccagacgactggccagggcg

SEQ ID NO: 327 - RNA, 21 nt, synthetic construct
  source 1..21: mol_type = other RNA
cccagttgtagcaccgcccag

SEQ ID NO: 328 - RNA, 21 nt, synthetic construct
  source 1..21: mol_type = other RNA
ccccacctacctaagaaccat

SEQ ID NO: 329 - RNA, 21 nt, synthetic construct
  source 1..21: mol_type = other RNA
cccctggctctgggacacctg

SEQ ID NO: 330 - RNA, 21 nt, synthetic construct
  source 1..21: mol_type = other RNA
ccctggccagtcgtctgggcg

SEQ ID NO: 331 - RNA, 21 nt, synthetic construct
  source 1..21: mol_type = other RNA
ccctggctctgggacacctga

SEQ ID NO: 332 - RNA, 21 nt, synthetic construct
  source 1..21: mol_type = other RNA
ccgaccccacctacctaagaa

SEQ ID NO: 333 - RNA, 21 nt, synthetic construct
  source 1..21: mol_type = other RNA
ccgccagcccagttgtagcac

SEQ ID NO: 334 - RNA, 21 nt, synthetic construct
  source 1..21: mol_type = other RNA
ccgcccagacgactggccagg

SEQ ID NO: 335 - RNA, 21 nt, synthetic construct
  source 1..21: mol_type = other RNA
ccgccgaccccacctacctaa

SEQ ID NO: 336 - RNA, 21 nt, synthetic construct
  source 1..21: mol_type = other RNA
cctaagaaccatcctggccgc

SEQ ID NO: 337 - RNA, 21 nt, synthetic construct
  source 1..21: mol_type = other RNA
cctacctaagaaccatcctgg

SEQ ID NO: 338 - RNA, 21 nt, synthetic construct
  source 1..21: mol_type = other RNA
cctgaccgccgaccccaccta

SEQ ID NO: 339 - RNA, 21 nt, synthetic construct
  source 1..21: mol_type = other RNA
cctggagcagccccaccagag

SEQ ID NO: 340 - RNA, 21 nt, synthetic construct
  source 1..21: mol_type = other RNA
cctggccagtcgtctgggcgg

SEQ ID NO: 341 - RNA, 21 nt, synthetic construct
  source 1..21: mol_type = other RNA
cctggccgccagcccagttgt

SEQ ID NO: 342 - RNA, 21 nt, synthetic construct
  source 1..21: mol_type = other RNA
cctggctctgggacacctgac

SEQ ID NO: 343 - RNA, 21 nt, synthetic construct
  source 1..21: mol_type = other RNA
cctgtgggatctgcatgcctg

SEQ ID NO: 344 - RNA, 21 nt, synthetic construct
  source 1..21: mol_type = other RNA
cgaccccacctacctaagaac

SEQ ID NO: 345 - RNA, 21 nt, synthetic construct
  source 1..21: mol_type = other RNA
cgactggccagggcgcctgtg

SEQ ID NO: 346 - RNA, 21 nt, synthetic construct
  source 1..21: mol_type = other RNA
cgccagcccagttgtagcacc

SEQ ID NO: 347 - RNA, 21 nt, synthetic construct
  source 1..21: mol_type = other RNA
cgcccagacgactggccaggg

SEQ ID NO: 348 - RNA, 21 nt, synthetic construct
  source 1..21: mol_type = other RNA
cgccctggccagtcgtctggg

SEQ ID NO: 349 - RNA, 21 nt, synthetic construct
  source 1..21: mol_type = other RNA
cgccgaccccacctacctaag

SEQ ID NO: 350 - RNA, 21 nt, synthetic construct
  source 1..21: mol_type = other RNA
cgcctgtgggatctgcatgcc

SEQ ID NO: 351 - RNA, 21 nt, synthetic construct
  source 1..21: mol_type = other RNA
cggcactctggtggggctgct

SEQ ID NO: 352 - RNA, 21 nt, synthetic construct
  source 1..21: mol_type = other RNA
cggccaggatggttcttaggt

SEQ ID NO: 353 - RNA, 21 nt, synthetic construct
  source 1..21: mol_type = other RNA
cggtgctacaactgggctggc

SEQ ID NO: 354 - RNA, 21 nt, synthetic construct
  source 1..21: mol_type = other RNA
cgtctgggcggtgctacaact

SEQ ID NO: 355 - RNA, 21 nt, synthetic construct
  source 1..21: mol_type = other RNA
ctaagaaccatcctggccgcc

SEQ ID NO: 356 - RNA, 21 nt, synthetic construct
  source 1..21: mol_type = other RNA
ctacaactgggctggcggcca

SEQ ID NO: 357 - RNA, 21 nt, synthetic construct
  source 1..21: mol_type = other RNA
ctacctaagaaccatcctggc

SEQ ID NO: 358 - RNA, 21 nt, synthetic construct
  source 1..21: mol_type = other RNA
ctccaggcatgcagatcccac

SEQ ID NO: 359 - RNA, 21 nt, synthetic construct
  source 1..21: mol_type = other RNA
ctctgggacacctgaccgccg

SEQ ID NO: 360 - RNA, 21 nt, synthetic construct
  source 1..21: mol_type = other RNA
ctctggtggggctgctccagg

SEQ ID NO: 361 - RNA, 21 nt, synthetic construct
  source 1..21: mol_type = other RNA
ctgaccgccgaccccacctac

SEQ ID NO: 362 - RNA, 21 nt, synthetic construct
  source 1..21: mol_type = other RNA
ctgcatgcctggagcagcccc

SEQ ID NO: 363 - RNA, 21 nt, synthetic construct
  source 1..21: mol_type = other RNA
ctgctccaggcatgcagatcc

SEQ ID NO: 364 - RNA, 21 nt, synthetic construct
  source 1..21: mol_type = other RNA
ctggagcagccccaccagagt

SEQ ID NO: 365 - RNA, 21 nt, synthetic construct
  source 1..21: mol_type = other RNA
ctggccagggcgcctgtggga

SEQ ID NO: 366 - RNA, 21 nt, synthetic construct
  source 1..21: mol_type = other RNA
ctggccagtcgtctgggcggt

SEQ ID NO: 367 - RNA, 21 nt, synthetic construct
  source 1..21: mol_type = other RNA
ctggccgccagcccagttgta

SEQ ID NO: 368 - RNA, 21 nt, synthetic construct
  source 1..21: mol_type = other RNA
ctggcggccaggatggttctt

SEQ ID NO: 369 - RNA, 21 nt, synthetic construct
  source 1..21: mol_type = other RNA
ctggctctgggacacctgacc

SEQ ID NO: 370 - RNA, 21 nt, synthetic construct
  source 1..21: mol_type = other RNA
ctgggacacctgaccgccgac

SEQ ID NO: 371 - RNA, 21 nt, synthetic construct
  source 1..21: mol_type = other RNA
ctgggcggtgctacaactggg

SEQ ID NO: 372 - RNA, 21 nt, synthetic construct
  source 1..21: mol_type = other RNA
ctgggctggcggccaggatgg

SEQ ID NO: 373 - RNA, 21 nt, synthetic construct
  source 1..21: mol_type = other RNA
ctggtggggctgctccaggca

SEQ ID NO: 374 - RNA, 21 nt, synthetic construct
  source 1..21: mol_type = other RNA
ctgtgggatctgcatgcctgg

SEQ ID NO: 375 - RNA, 21 nt, synthetic construct
  source 1..21: mol_type = other RNA
cttaggtaggtggggtcggcg

SEQ ID NO: 376 - RNA, 21 nt, synthetic construct
  source 1..21: mol_type = other RNA
gaaccatcctggccgccagcc

SEQ ID NO: 377 - RNA, 21 nt, synthetic construct
  source 1..21: mol_type = other RNA
gaaggcggcactctggtgggg

SEQ ID NO: 378 - RNA, 21 nt, synthetic construct
  source 1..21: mol_type = other RNA
gacacctgaccgccgacccca

SEQ ID NO: 379 - RNA, 21 nt, synthetic construct
  source 1..21: mol_type = other RNA
gaccccacctacctaagaacc

SEQ ID NO: 380 - RNA, 21 nt, synthetic construct
  source 1..21: mol_type = other RNA
gaccgccgaccccacctacct

SEQ ID NO: 381 - RNA, 21 nt, synthetic construct
  source 1..21: mol_type = other RNA
gacgactggccagggcgcctg

SEQ ID NO: 382 - RNA, 21 nt, synthetic construct
  source 1..21: mol_type = other RNA
gactggccagggcgcctgtgg

SEQ ID NO: 383 - RNA, 21 nt, synthetic construct
  source 1..21: mol_type = other RNA
gagaaggcggcactctggtgg

SEQ ID NO: 384 - RNA, 21 nt, synthetic construct
  source 1..21: mol_type = other RNA
gagcagccccaccagagtgcc

SEQ ID NO: 385 - RNA, 21 nt, synthetic construct
  source 1..21: mol_type = other RNA
gatcccacaggcgccctggcc

SEQ ID NO: 386 - RNA, 21 nt, synthetic construct
  source 1..21: mol_type = other RNA
gatctgcatgcctggagcagc

SEQ ID NO: 387 - RNA, 21 nt, synthetic construct
  source 1..21: mol_type = other RNA
gatggttcttaggtaggtggg

SEQ ID NO: 388 - RNA, 21 nt, synthetic construct
  source 1..21: mol_type = other RNA
gcaccgcccagacgactggcc

SEQ ID NO: 389 - RNA, 21 nt, synthetic construct
  source 1..21: mol_type = other RNA
gcactctggtggggctgctcc

SEQ ID NO: 390 - RNA, 21 nt, synthetic construct
  source 1..21: mol_type = other RNA
gcagatcccacaggcgccctg

SEQ ID NO: 391 - RNA, 21 nt, synthetic construct
  source 1..21: mol_type = other RNA
gcagccccaccagagtgccgc

SEQ ID NO: 392 - RNA, 21 nt, synthetic construct
  source 1..21: mol_type = other RNA
gcatgcagatcccacaggcgc

SEQ ID NO: 393 - RNA, 21 nt, synthetic construct
  source 1..21: mol_type = other RNA
gcatgcctggagcagccccac

SEQ ID NO: 394 - RNA, 21 nt, synthetic construct
  source 1..21: mol_type = other RNA
gccagcccagttgtagcaccg

SEQ ID NO: 395 - RNA, 21 nt, synthetic construct
  source 1..21: mol_type = other RNA
gccaggatggttcttaggtag

SEQ ID NO: 396 - RNA, 21 nt, synthetic construct
  source 1..21: mol_type = other RNA
gccagggcgcctgtgggatct

SEQ ID NO: 397 - RNA, 21 nt, synthetic construct
  source 1..21: mol_type = other RNA
gccagtcgtctgggcggtgct

SEQ ID NO: 398 - RNA, 21 nt, synthetic construct
  source 1..21: mol_type = other RNA
gcccagacgactggccagggc

SEQ ID NO: 399 - RNA, 21 nt, synthetic construct
  source 1..21: mol_type = other RNA
gcccagttgtagcaccgccca

SEQ ID NO: 400 - RNA, 21 nt, synthetic construct
  source 1..21: mol_type = other RNA
gccctggccagtcgtctgggc

SEQ ID NO: 401 - RNA, 21 nt, synthetic construct
  source 1..21: mol_type = other RNA
gccgaccccacctacctaaga

SEQ ID NO: 402 - RNA, 21 nt, synthetic construct
  source 1..21: mol_type = other RNA
gccgccagcccagttgtagca

SEQ ID NO: 403 - RNA, 21 nt, synthetic construct
  source 1..21: mol_type = other RNA
gcctggagcagccccaccaga

SEQ ID NO: 404 - RNA, 21 nt, synthetic construct
  source 1..21: mol_type = other RNA
gcctgtgggatctgcatgcct

SEQ ID NO: 405 - RNA, 21 nt, synthetic construct
  source 1..21: mol_type = other RNA
gcgccctggccagtcgtctgg

SEQ ID NO: 406 - RNA, 21 nt, synthetic construct
  source 1..21: mol_type = other RNA
gcgcctgtgggatctgcatgc

SEQ ID NO: 407 - RNA, 21 nt, synthetic construct
  source 1..21: mol_type = other RNA
gcggcactctggtggggctgc

SEQ ID NO: 408 - RNA, 21 nt, synthetic construct
  source 1..21: mol_type = other RNA
gcggccaggatggttcttagg

SEQ ID NO: 409 - RNA, 21 nt, synthetic construct
  source 1..21: mol_type = other RNA
gcggtgctacaactgggctgg

SEQ ID NO: 410 - RNA, 21 nt, synthetic construct
  source 1..21: mol_type = other RNA
gctacaactgggctggcggcc

SEQ ID NO: 411 - RNA, 21 nt, synthetic construct
  source 1..21: mol_type = other RNA
gctccaggcatgcagatccca

SEQ ID NO: 412 - RNA, 21 nt, synthetic construct
  source 1..21: mol_type = other RNA
gctctgggacacctgaccgcc

SEQ ID NO: 413 - RNA, 21 nt, synthetic construct
  source 1..21: mol_type = other RNA
gctgctccaggcatgcagatc

SEQ ID NO: 414 - RNA, 21 nt, synthetic construct
  source 1..21: mol_type = other RNA
gctggcggccaggatggttct

SEQ ID NO: 415 - RNA, 21 nt, synthetic construct
  source 1..21: mol_type = other RNA
ggacacctgaccgccgacccc

SEQ ID NO: 416 - RNA, 21 nt, synthetic construct
  source 1..21: mol_type = other RNA
ggagaaggcggcactctggtg

SEQ ID NO: 417 - RNA, 21 nt, synthetic construct
  source 1..21: mol_type = other RNA
ggagcagccccaccagagtgc

SEQ ID NO: 418 - RNA, 21 nt, synthetic construct
  source 1..21: mol_type = other RNA
ggatctgcatgcctggagcag

SEQ ID NO: 419 - RNA, 21 nt, synthetic construct
  source 1..21: mol_type = other RNA
ggatggttcttaggtaggtgg

SEQ ID NO: 420 - RNA, 21 nt, synthetic construct
  source 1..21: mol_type = other RNA
ggcactctggtggggctgctc

SEQ ID NO: 421 - RNA, 21 nt, synthetic construct
  source 1..21: mol_type = other RNA
ggcatgcagatcccacaggcg

SEQ ID NO: 422 - RNA, 21 nt, synthetic construct
  source 1..21: mol_type = other RNA
ggccaggatggttcttaggta

SEQ ID NO: 423 - RNA, 21 nt, synthetic construct
  source 1..21: mol_type = other RNA
ggccagggcgcctgtgggatc

SEQ ID NO: 424 - RNA, 21 nt, synthetic construct
  source 1..21: mol_type = other RNA
ggccagtcgtctgggcggtgc

SEQ ID NO: 425 - RNA, 21 nt, synthetic construct
  source 1..21: mol_type = other RNA
ggccgccagcccagttgtagc

SEQ ID NO: 426 - RNA, 21 nt, synthetic construct
  source 1..21: mol_type = other RNA
ggcgccctggccagtcgtctg

SEQ ID NO: 427 - RNA, 21 nt, synthetic construct
  source 1..21: mol_type = other RNA
ggcgcctgtgggatctgcatg

SEQ ID NO: 428 - RNA, 21 nt, synthetic construct
  source 1..21: mol_type = other RNA
ggcggcactctggtggggctg

SEQ ID NO: 429 - RNA, 21 nt, synthetic construct
  source 1..21: mol_type = other RNA
ggcggccaggatggttcttag

SEQ ID NO: 430 - RNA, 21 nt, synthetic construct
  source 1..21: mol_type = other RNA
ggcggtgctacaactgggctg

SEQ ID NO: 431 - RNA, 21 nt, synthetic construct
  source 1..21: mol_type = other RNA
ggctctgggacacctgaccgc

SEQ ID NO: 432 - RNA, 21 nt, synthetic construct
  source 1..21: mol_type = other RNA
ggctgctccaggcatgcagat

SEQ ID NO: 433 - RNA, 21 nt, synthetic construct
  source 1..21: mol_type = other RNA
ggctggcggccaggatggttc

SEQ ID NO: 434 - RNA, 21 nt, synthetic construct
  source 1..21: mol_type = other RNA
gggacacctgaccgccgaccc

SEQ ID NO: 435 - RNA, 21 nt, synthetic construct
  source 1..21: mol_type = other RNA
gggatctgcatgcctggagca

SEQ ID NO: 436 - RNA, 21 nt, synthetic construct
  source 1..21: mol_type = other RNA
gggcgcctgtgggatctgcat

SEQ ID NO: 437 - RNA, 21 nt, synthetic construct
  source 1..21: mol_type = other RNA
gggcggtgctacaactgggct

SEQ ID NO: 438 - RNA, 21 nt, synthetic construct
  source 1..21: mol_type = other RNA
gggctgctccaggcatgcaga

SEQ ID NO: 439 - RNA, 21 nt, synthetic construct
  source 1..21: mol_type = other RNA
gggctggcggccaggatggtt

SEQ ID NO: 440 - RNA, 21 nt, synthetic construct
  source 1..21: mol_type = other RNA
ggggctgctccaggcatgcag

SEQ ID NO: 441 - RNA, 21 nt, synthetic construct
  source 1..21: mol_type = other RNA
ggggtcggcggtcaggtgtcc

SEQ ID NO: 442 - RNA, 21 nt, synthetic construct
  source 1..21: mol_type = other RNA
gggtcggcggtcaggtgtccc

SEQ ID NO: 443 - RNA, 21 nt, synthetic construct
  source 1..21: mol_type = other RNA
ggtaggtggggtcggcggtca

SEQ ID NO: 444 - RNA, 21 nt, synthetic construct
  source 1..21: mol_type = other RNA
ggtcggcggtcaggtgtccca

SEQ ID NO: 445 - RNA, 21 nt, synthetic construct
  source 1..21: mol_type = other RNA
ggtgctacaactgggctggcg

SEQ ID NO: 446 - RNA, 21 nt, synthetic construct
  source 1..21: mol_type = other RNA
ggtggggctgctccaggcatg

SEQ ID NO: 447 - RNA, 21 nt, synthetic construct
  source 1..21: mol_type = other RNA
ggtggggtcggcggtcaggtg

SEQ ID NO: 448 - RNA, 21 nt, synthetic construct
  source 1..21: mol_type = other RNA
ggttcttaggtaggtggggtc

SEQ ID NO: 449 - RNA, 21 nt, synthetic construct
  source 1..21: mol_type = other RNA
gtagcaccgcccagacgactg

SEQ ID NO: 450 - RNA, 21 nt, synthetic construct
  source 1..21: mol_type = other RNA
gtaggtggggtcggcggtcag

SEQ ID NO: 451 - RNA, 21 nt, synthetic construct
  source 1..21: mol_type = other RNA
gtcggcggtcaggtgtcccag

SEQ ID NO: 452 - RNA, 21 nt, synthetic construct
  source 1..21: mol_type = other RNA
gtcgtctgggcggtgctacaa

SEQ ID NO: 453 - RNA, 21 nt, synthetic construct
  source 1..21: mol_type = other RNA
gtctgggcggtgctacaactg

SEQ ID NO: 454 - RNA, 21 nt, synthetic construct
  source 1..21: mol_type = other RNA
gtgctacaactgggctggcgg

SEQ ID NO: 455 - RNA, 21 nt, synthetic construct
  source 1..21: mol_type = other RNA
gtggagaaggcggcactctgg

SEQ ID NO: 456 - RNA, 21 nt, synthetic construct
  source 1..21: mol_type = other RNA
gtgggatctgcatgcctggag

SEQ ID NO: 457 - RNA, 21 nt, synthetic construct
  source 1..21: mol_type = other RNA
gtggggctgctccaggcatgc

SEQ ID NO: 458 - RNA, 21 nt, synthetic construct
  source 1..21: mol_type = other RNA
gtggggtcggcggtcaggtgt

SEQ ID NO: 459 - RNA, 21 nt, synthetic construct
  source 1..21: mol_type = other RNA
gttcttaggtaggtggggtcg

SEQ ID NO: 460 - RNA, 21 nt, synthetic construct
  source 1..21: mol_type = other RNA
gttgtagcaccgcccagacga

SEQ ID NO: 461 - RNA, 21 nt, synthetic construct
  source 1..21: mol_type = other RNA
taagaaccatcctggccgcca

SEQ ID NO: 462 - RNA, 21 nt, synthetic construct
  source 1..21: mol_type = other RNA
tacaactgggctggcggccag

SEQ ID NO: 463 - RNA, 21 nt, synthetic construct
  source 1..21: mol_type = other RNA
tacctaagaaccatcctggcc

SEQ ID NO: 464 - RNA, 21 nt, synthetic construct
  source 1..21: mol_type = other RNA
tagcaccgcccagacgactgg

SEQ ID NO: 465 - RNA, 21 nt, synthetic construct
  source 1..21: mol_type = other RNA
taggtaggtggggtcggcggt

SEQ ID NO: 466 - RNA, 21 nt, synthetic construct
  source 1..21: mol_type = other RNA
taggtggggtcggcggtcagg

SEQ ID NO: 467 - RNA, 21 nt, synthetic construct
  source 1..21: mol_type = other RNA
tccaggcatgcagatcccaca

SEQ ID NO: 468 - RNA, 21 nt, synthetic construct
  source 1..21: mol_type = other RNA
tcccacaggcgccctggccag

SEQ ID NO: 469 - RNA, 21 nt, synthetic construct
  source 1..21: mol_type = other RNA
tcctggccgccagcccagttg

SEQ ID NO: 470 - RNA, 21 nt, synthetic construct
  source 1..21: mol_type = other RNA
tcggcggtcaggtgtcccaga

SEQ ID NO: 471 - RNA, 21 nt, synthetic construct
  source 1..21: mol_type = other RNA
tcgtctgggcggtgctacaac

SEQ ID NO: 472 - RNA, 21 nt, synthetic construct
  source 1..21: mol_type = other RNA
tctgcatgcctggagcagccc

SEQ ID NO: 473 - RNA, 21 nt, synthetic construct
  source 1..21: mol_type = other RNA
tctgggacacctgaccgccga

SEQ ID NO: 474 - RNA, 21 nt, synthetic construct
  source 1..21: mol_type = other RNA
tctgggcggtgctacaactgg

SEQ ID NO: 475 - RNA, 21 nt, synthetic construct
  source 1..21: mol_type = other RNA
tctggtggggctgctccaggc

SEQ ID NO: 476 - RNA, 21 nt, synthetic construct
  source 1..21: mol_type = other RNA
tcttaggtaggtggggtcggc

SEQ ID NO: 477 - RNA, 21 nt, synthetic construct
  source 1..21: mol_type = other RNA
tgaccgccgaccccacctacc

SEQ ID NO: 478 - RNA, 21 nt, synthetic construct
  source 1..21: mol_type = other RNA
tgcagatcccacaggcgccct

SEQ ID NO: 479 - RNA, 21 nt, synthetic construct
  source 1..21: mol_type = other RNA
tgcatgcctggagcagcccca

SEQ ID NO: 480 - RNA, 21 nt, synthetic construct
  source 1..21: mol_type = other RNA
tgcctggagcagccccaccag

SEQ ID NO: 481 - RNA, 21 nt, synthetic construct
  source 1..21: mol_type = other RNA
tgctacaactgggctggcggc

SEQ ID NO: 482 - RNA, 21 nt, synthetic construct
  source 1..21: mol_type = other RNA
tgctccaggcatgcagatccc

SEQ ID NO: 483 - RNA, 21 nt, synthetic construct
  source 1..21: mol_type = other RNA
tggagaaggcggcactctggt

SEQ ID NO: 484 - RNA, 21 nt, synthetic construct
  source 1..21: mol_type = other RNA
tggagcagccccaccagagtg

SEQ ID NO: 485 - RNA, 21 nt, synthetic construct
  source 1..21: mol_type = other RNA
tggccagggcgcctgtgggat

SEQ ID NO: 486 - RNA, 21 nt, synthetic construct
  source 1..21: mol_type = other RNA
tggccagtcgtctgggcggtg

SEQ ID NO: 487 - RNA, 21 nt, synthetic construct
  source 1..21: mol_type = other RNA
tggccgccagcccagttgtag

SEQ ID NO: 488 - RNA, 21 nt, synthetic construct
  source 1..21: mol_type = other RNA
tggcggccaggatggttctta

SEQ ID NO: 489 - RNA, 21 nt, synthetic construct
  source 1..21: mol_type = other RNA
tggctctgggacacctgaccg

SEQ ID NO: 490 - RNA, 21 nt, synthetic construct
  source 1..21: mol_type = other RNA
tgggacacctgaccgccgacc

SEQ ID NO: 491 - RNA, 21 nt, synthetic construct
  source 1..21: mol_type = other RNA
tgggatctgcatgcctggagc

SEQ ID NO: 492 - RNA, 21 nt, synthetic construct
  source 1..21: mol_type = other RNA
tgggcggtgctacaactgggc

SEQ ID NO: 493 - RNA, 21 nt, synthetic construct
  source 1..21: mol_type = other RNA
tgggctggcggccaggatggt

SEQ ID NO: 494 - RNA, 21 nt, synthetic construct
  source 1..21: mol_type = other RNA
tggggctgctccaggcatgca

SEQ ID NO: 495 - RNA, 21 nt, synthetic construct
  source 1..21: mol_type = other RNA
tggggtcggcggtcaggtgtc

SEQ ID NO: 496 - RNA, 21 nt, synthetic construct
  source 1..21: mol_type = other RNA
tggtggggctgctccaggcat

SEQ ID NO: 497 - RNA, 21 nt, synthetic construct
  source 1..21: mol_type = other RNA
tggttcttaggtaggtggggt

SEQ ID NO: 498 - RNA, 21 nt, synthetic construct
  source 1..21: mol_type = other RNA
tgtagcaccgcccagacgact

SEQ ID NO: 499 - RNA, 21 nt, synthetic construct
  source 1..21: mol_type = other RNA
tgtgggatctgcatgcctgga

SEQ ID NO: 500 - RNA, 21 nt, synthetic construct
  source 1..21: mol_type = other RNA
ttaggtaggtggggtcggcgg

SEQ ID NO: 501 - RNA, 21 nt, synthetic construct
  source 1..21: mol_type = other RNA
ttcttaggtaggtggggtcgg

SEQ ID NO: 502 - RNA, 21 nt, synthetic construct
  source 1..21: mol_type = other RNA
ttgtagcaccgcccagacgac

SEQ ID NO: 503 - RNA, 22 nt, synthetic construct
  source 1..22: mol_type = other RNA
aaccatcctggccgccagccca

SEQ ID NO: 504 - RNA, 22 nt, synthetic construct
  source 1..22: mol_type = other RNA
aactgggctggcggccaggatg

SEQ ID NO: 505 - RNA, 22 nt, synthetic construct
  source 1..22: mol_type = other RNA
aagaaccatcctggccgccagc

SEQ ID NO: 506 - RNA, 22 nt, synthetic construct
  source 1..22: mol_type = other RNA
aaggcggcactctggtggggct

SEQ ID NO: 507 - RNA, 22 nt, synthetic construct
  source 1..22: mol_type = other RNA
acaactgggctggcggccagga

SEQ ID NO: 508 - RNA, 22 nt, synthetic construct
  source 1..22: mol_type = other RNA
acacctgaccgccgaccccacc

SEQ ID NO: 509 - RNA, 22 nt, synthetic construct
  source 1..22: mol_type = other RNA
acaggcgccctggccagtcgtc

SEQ ID NO: 510 - RNA, 22 nt, synthetic construct
  source 1..22: mol_type = other RNA
accatcctggccgccagcccag

SEQ ID NO: 511 - RNA, 22 nt, synthetic construct
  source 1..22: mol_type = other RNA
accccacctacctaagaaccat

SEQ ID NO: 512 - RNA, 22 nt, synthetic construct
  source 1..22: mol_type = other RNA
accgcccagacgactggccagg

SEQ ID NO: 513 - RNA, 22 nt, synthetic construct
  source 1..22: mol_type = other RNA
accgccgaccccacctacctaa

SEQ ID NO: 514 - RNA, 22 nt, synthetic construct
  source 1..22: mol_type = other RNA
acctaagaaccatcctggccgc

SEQ ID NO: 515 - RNA, 22 nt, synthetic construct
  source 1..22: mol_type = other RNA
acctacctaagaaccatcctgg

SEQ ID NO: 516 - RNA, 22 nt, synthetic construct
  source 1..22: mol_type = other RNA
acctgaccgccgaccccaccta

SEQ ID NO: 517 - RNA, 22 nt, synthetic construct
  source 1..22: mol_type = other RNA
acgactggccagggcgcctgtg

SEQ ID NO: 518 - RNA, 22 nt, synthetic construct
  source 1..22: mol_type = other RNA
actctggtggggctgctccagg

SEQ ID NO: 519 - RNA, 22 nt, synthetic construct
  source 1..22: mol_type = other RNA
actggccagggcgcctgtggga

SEQ ID NO: 520 - RNA, 22 nt, synthetic construct
  source 1..22: mol_type = other RNA
actgggctggcggccaggatgg

SEQ ID NO: 521 - RNA, 22 nt, synthetic construct
  source 1..22: mol_type = other RNA
agaaccatcctggccgccagcc

SEQ ID NO: 522 - RNA, 22 nt, synthetic construct
  source 1..22: mol_type = other RNA
agaaggcggcactctggtgggg

SEQ ID NO: 523 - RNA, 22 nt, synthetic construct
  source 1..22: mol_type = other RNA
agacgactggccagggcgcctg

SEQ ID NO: 524 - RNA, 22 nt, synthetic construct
  source 1..22: mol_type = other RNA
agatcccacaggcgccctggcc

SEQ ID NO: 525 - RNA, 22 nt, synthetic construct
  source 1..22: mol_type = other RNA
agcaccgcccagacgactggcc

SEQ ID NO: 526 - RNA, 22 nt, synthetic construct
  source 1..22: mol_type = other RNA
agcagccccaccagagtgccgc

SEQ ID NO: 527 - RNA, 22 nt, synthetic construct
  source 1..22: mol_type = other RNA
agcccagttgtagcaccgccca

SEQ ID NO: 528 - RNA, 22 nt, synthetic construct
  source 1..22: mol_type = other RNA
aggatggttcttaggtaggtgg

SEQ ID NO: 529 - RNA, 22 nt, synthetic construct
  source 1..22: mol_type = other RNA
aggcatgcagatcccacaggcg

SEQ ID NO: 530 - RNA, 22 nt, synthetic construct
  source 1..22: mol_type = other RNA
aggcgccctggccagtcgtctg

SEQ ID NO: 531 - RNA, 22 nt, synthetic construct
  source 1..22: mol_type = other RNA
aggcggcactctggtggggctg

SEQ ID NO: 532 - RNA, 22 nt, synthetic construct
  source 1..22: mol_type = other RNA
agggcgcctgtgggatctgcat

SEQ ID NO: 533 - RNA, 22 nt, synthetic construct
  source 1..22: mol_type = other RNA
aggtaggtggggtcggcggtca

SEQ ID NO: 534 - RNA, 22 nt, synthetic construct
  source 1..22: mol_type = other RNA
aggtggggtcggcggtcaggtg

SEQ ID NO: 535 - RNA, 22 nt, synthetic construct
  source 1..22: mol_type = other RNA
agtcgtctgggcggtgctacaa

SEQ ID NO: 536 - RNA, 22 nt, synthetic construct
  source 1..22: mol_type = other RNA
agtggagaaggcggcactctgg

SEQ ID NO: 537 - RNA, 22 nt, synthetic construct
  source 1..22: mol_type = other RNA
agttgtagcaccgcccagacga

SEQ ID NO: 538 - RNA, 22 nt, synthetic construct
  source 1..22: mol_type = other RNA
atcccacaggcgccctggccag

SEQ ID NO: 539 - RNA, 22 nt, synthetic construct
  source 1..22: mol_type = other RNA
atcctggccgccagcccagttg

SEQ ID NO: 540 - RNA, 22 nt, synthetic construct
  source 1..22: mol_type = other RNA
atctgcatgcctggagcagccc

SEQ ID NO: 541 - RNA, 22 nt, synthetic construct
  source 1..22: mol_type = other RNA
atgcagatcccacaggcgccct

SEQ ID NO: 542 - RNA, 22 nt, synthetic construct
  source 1..22: mol_type = other RNA
atgcctggagcagccccaccag

SEQ ID NO: 543 - RNA, 22 nt, synthetic construct
  source 1..22: mol_type = other RNA
atggttcttaggtaggtggggt

SEQ ID NO: 544 - RNA, 22 nt, synthetic construct
  source 1..22: mol_type = other RNA
caactgggctggcggccaggat

SEQ ID NO: 545 - RNA, 22 nt, synthetic construct
  source 1..22: mol_type = other RNA
cacaggcgccctggccagtcgt

SEQ ID NO: 546 - RNA, 22 nt, synthetic construct
  source 1..22: mol_type = other RNA
caccgcccagacgactggccag

SEQ ID NO: 547 - RNA, 22 nt, synthetic construct
  source 1..22: mol_type = other RNA
cacctacctaagaaccatcctg

SEQ ID NO: 548 - RNA, 22 nt, synthetic construct
  source 1..22: mol_type = other RNA
cacctgaccgccgaccccacct

SEQ ID NO: 549 - RNA, 22 nt, synthetic construct
  source 1..22: mol_type = other RNA
cactctggtggggctgctccag

SEQ ID NO: 550 - RNA, 22 nt, synthetic construct
  source 1..22: mol_type = other RNA
cagacgactggccagggcgcct

SEQ ID NO: 551 - RNA, 22 nt, synthetic construct
  source 1..22: mol_type = other RNA
cagatcccacaggcgccctggc

SEQ ID NO: 552 - RNA, 22 nt, synthetic construct
  source 1..22: mol_type = other RNA
cagcccagttgtagcaccgccc

SEQ ID NO: 553 - RNA, 22 nt, synthetic construct
  source 1..22: mol_type = other RNA
cagccccaccagagtgccgcct

SEQ ID NO: 554 - RNA, 22 nt, synthetic construct
  source 1..22: mol_type = other RNA
caggatggttcttaggtaggtg

SEQ ID NO: 555 - RNA, 22 nt, synthetic construct
  source 1..22: mol_type = other RNA
caggcatgcagatcccacaggc

SEQ ID NO: 556 - RNA, 22 nt, synthetic construct
  source 1..22: mol_type = other RNA
caggcgccctggccagtcgtct

SEQ ID NO: 557 - RNA, 22 nt, synthetic construct
  source 1..22: mol_type = other RNA
cagggcgcctgtgggatctgca

SEQ ID NO: 558 - RNA, 22 nt, synthetic construct
  source 1..22: mol_type = other RNA
cagtcgtctgggcggtgctaca

SEQ ID NO: 559 - RNA, 22 nt, synthetic construct
  source 1..22: mol_type = other RNA
cagttgtagcaccgcccagacg

SEQ ID NO: 560 - RNA, 22 nt, synthetic construct
  source 1..22: mol_type = other RNA
catcctggccgccagcccagtt

SEQ ID NO: 561 - RNA, 22 nt, synthetic construct
  source 1..22: mol_type = other RNA
catgcagatcccacaggcgccc

SEQ ID NO: 562 - RNA, 22 nt, synthetic construct
  source 1..22: mol_type = other RNA
catgcctggagcagccccacca

SEQ ID NO: 563 - RNA, 22 nt, synthetic construct
  source 1..22: mol_type = other RNA
ccacaggcgccctggccagtcg

SEQ ID NO: 564 - RNA, 22 nt, synthetic construct
  source 1..22: mol_type = other RNA
ccacctacctaagaaccatcct

SEQ ID NO: 565 - RNA, 22 nt, synthetic construct
  source 1..22: mol_type = other RNA
ccagacgactggccagggcgcc

SEQ ID NO: 566 - RNA, 22 nt, synthetic construct
  source 1..22: mol_type = other RNA
ccagcccagttgtagcaccgcc

SEQ ID NO: 567 - RNA, 22 nt, synthetic construct
  source 1..22: mol_type = other RNA
ccaggatggttcttaggtaggt

SEQ ID NO: 568 - RNA, 22 nt, synthetic construct
  source 1..22: mol_type = other RNA
ccaggcatgcagatcccacagg

SEQ ID NO: 569 - RNA, 22 nt, synthetic construct
  source 1..22: mol_type = other RNA
ccagggcgcctgtgggatctgc

SEQ ID NO: 570 - RNA, 22 nt, synthetic construct
  source 1..22: mol_type = other RNA
ccagtcgtctgggcggtgctac

SEQ ID NO: 571 - RNA, 22 nt, synthetic construct
  source 1..22: mol_type = other RNA
ccagttgtagcaccgcccagac

SEQ ID NO: 572 - RNA, 22 nt, synthetic construct
  source 1..22: mol_type = other RNA
ccatcctggccgccagcccagt

SEQ ID NO: 573 - RNA, 22 nt, synthetic construct
  source 1..22: mol_type = other RNA
cccacaggcgccctggccagtc

SEQ ID NO: 574 - RNA, 22 nt, synthetic construct
  source 1..22: mol_type = other RNA
cccacctacctaagaaccatcc

SEQ ID NO: 575 - RNA, 22 nt, synthetic construct
  source 1..22: mol_type = other RNA
cccagacgactggccagggcgc

SEQ ID NO: 576 - RNA, 22 nt, synthetic construct
  source 1..22: mol_type = other RNA
cccagttgtagcaccgcccaga

SEQ ID NO: 577 - RNA, 22 nt, synthetic construct
  source 1..22: mol_type = other RNA
ccccacctacctaagaaccatc

SEQ ID NO: 578 - RNA, 22 nt, synthetic construct
  source 1..22: mol_type = other RNA
cccctggctctgggacacctga

SEQ ID NO: 579 - RNA, 22 nt, synthetic construct
  source 1..22: mol_type = other RNA
ccctggccagtcgtctgggcgg

SEQ ID NO: 580 - RNA, 22 nt, synthetic construct
  source 1..22: mol_type = other RNA
ccctggctctgggacacctgac

SEQ ID NO: 581 - RNA, 22 nt, synthetic construct
  source 1..22: mol_type = other RNA
ccgaccccacctacctaagaac

SEQ ID NO: 582 - RNA, 22 nt, synthetic construct
  source 1..22: mol_type = other RNA
ccgccagcccagttgtagcacc

SEQ ID NO: 583 - RNA, 22 nt, synthetic construct
  source 1..22: mol_type = other RNA
ccgcccagacgactggccaggg

SEQ ID NO: 584 - RNA, 22 nt, synthetic construct
  source 1..22: mol_type = other RNA
ccgccgaccccacctacctaag

SEQ ID NO: 585 - RNA, 22 nt, synthetic construct
  source 1..22: mol_type = other RNA
cctaagaaccatcctggccgcc

SEQ ID NO: 586 - RNA, 22 nt, synthetic construct
  source 1..22: mol_type = other RNA
cctacctaagaaccatcctggc

SEQ ID NO: 587 - RNA, 22 nt, synthetic construct
  source 1..22: mol_type = other RNA
cctgaccgccgaccccacctac

SEQ ID NO: 588 - RNA, 22 nt, synthetic construct
  source 1..22: mol_type = other RNA
cctggagcagccccaccagagt

SEQ ID NO: 589 - RNA, 22 nt, synthetic construct
  source 1..22: mol_type = other RNA
cctggccagtcgtctgggcggt

SEQ ID NO: 590 - RNA, 22 nt, synthetic construct
  source 1..22: mol_type = other RNA
cctggccgccagcccagttgta

SEQ ID NO: 591 - RNA, 22 nt, synthetic construct
  source 1..22: mol_type = other RNA
cctggctctgggacacctgacc

SEQ ID NO: 592 - RNA, 22 nt, synthetic construct
  source 1..22: mol_type = other RNA
cctgtgggatctgcatgcctgg

SEQ ID NO: 593 - RNA, 22 nt, synthetic construct
  source 1..22: mol_type = other RNA
cgaccccacctacctaagaacc

SEQ ID NO: 594 - RNA, 22 nt, synthetic construct
  source 1..22: mol_type = other RNA
cgactggccagggcgcctgtgg

SEQ ID NO: 595 - RNA, 22 nt, synthetic construct
  source 1..22: mol_type = other RNA
cgccagcccagttgtagcaccg

SEQ ID NO: 596 - RNA, 22 nt, synthetic construct
  source 1..22: mol_type = other RNA
cgcccagacgactggccagggc

SEQ ID NO: 597 - RNA, 22 nt, synthetic construct
  source 1..22: mol_type = other RNA
cgccctggccagtcgtctgggc

SEQ ID NO: 598 - RNA, 22 nt, synthetic construct
  source 1..22: mol_type = other RNA
cgccgaccccacctacctaaga

SEQ ID NO: 599 - RNA, 22 nt, synthetic construct
  source 1..22: mol_type = other RNA
cgcctgtgggatctgcatgcct

SEQ ID NO: 600 - RNA, 22 nt, synthetic construct
  source 1..22: mol_type = other RNA
cggcactctggtggggctgctc

SEQ ID NO: 601 - RNA, 22 nt, synthetic construct
  source 1..22: mol_type = other RNA
cggccaggatggttcttaggta

SEQ ID NO: 602 - RNA, 22 nt, synthetic construct
  source 1..22: mol_type = other RNA
cggtgctacaactgggctggcg

SEQ ID NO: 603 - RNA, 22 nt, synthetic construct
  source 1..22: mol_type = other RNA
cgtctgggcggtgctacaactg

SEQ ID NO: 604 - RNA, 22 nt, synthetic construct
  source 1..22: mol_type = other RNA
ctaagaaccatcctggccgcca

SEQ ID NO: 605 - RNA, 22 nt, synthetic construct
  source 1..22: mol_type = other RNA
ctacaactgggctggcggccag

SEQ ID NO: 606 - RNA, 22 nt, synthetic construct
  source 1..22: mol_type = other RNA
ctacctaagaaccatcctggcc

SEQ ID NO: 607 - RNA, 22 nt, synthetic construct
  source 1..22: mol_type = other RNA
ctccaggcatgcagatcccaca

SEQ ID NO: 608 - RNA, 22 nt, synthetic construct
  source 1..22: mol_type = other RNA
ctctgggacacctgaccgccga

SEQ ID NO: 609 - RNA, 22 nt, synthetic construct
  source 1..22: mol_type = other RNA
ctctggtggggctgctccaggc

SEQ ID NO: 610 - RNA, 22 nt, synthetic construct
  source 1..22: mol_type = other RNA
ctgaccgccgaccccacctacc

SEQ ID NO: 611 - RNA, 22 nt, synthetic construct
  source 1..22: mol_type = other RNA
ctgcatgcctggagcagcccca

SEQ ID NO: 612 - RNA, 22 nt, synthetic construct
  source 1..22: mol_type = other RNA
ctgctccaggcatgcagatccc

SEQ ID NO: 613 - RNA, 22 nt, synthetic construct
  source 1..22: mol_type = other RNA
ctggagcagccccaccagagtg

SEQ ID NO: 614 - RNA, 22 nt, synthetic construct
  source 1..22: mol_type = other RNA
ctggccagggcgcctgtgggat

SEQ ID NO: 615 - RNA, 22 nt, synthetic construct
  source 1..22: mol_type = other RNA
ctggccagtcgtctgggcggtg

SEQ ID NO: 616 - RNA, 22 nt, synthetic construct
  source 1..22: mol_type = other RNA
ctggccgccagcccagttgtag

SEQ ID NO: 617 - RNA, 22 nt, synthetic construct
  source 1..22: mol_type = other RNA
ctggcggccaggatggttctta

SEQ ID NO: 618 - RNA, 22 nt, synthetic construct
  source 1..22: mol_type = other RNA
ctggctctgggacacctgaccg

SEQ ID NO: 619 - RNA, 22 nt, synthetic construct
  source 1..22: mol_type = other RNA
ctgggacacctgaccgccgacc

SEQ ID NO: 620 - RNA, 22 nt, synthetic construct
  source 1..22: mol_type = other RNA
ctgggcggtgctacaactgggc

SEQ ID NO: 621 - RNA, 22 nt, synthetic construct
  source 1..22: mol_type = other RNA
ctgggctggcggccaggatggt

SEQ ID NO: 622 - RNA, 22 nt, synthetic construct
  source 1..22: mol_type = other RNA
ctggtggggctgctccaggcat

SEQ ID NO: 623 - RNA, 22 nt, synthetic construct
  source 1..22: mol_type = other RNA
ctgtgggatctgcatgcctgga

SEQ ID NO: 624 - RNA, 22 nt, synthetic construct
  source 1..22: mol_type = other RNA
cttaggtaggtggggtcggcgg

SEQ ID NO: 625 - RNA, 22 nt, synthetic construct
  source 1..22: mol_type = other RNA
gaaccatcctggccgccagccc

SEQ ID NO: 626 - RNA, 22 nt, synthetic construct
  source 1..22: mol_type = other RNA
gaaggcggcactctggtggggc

SEQ ID NO: 627 - RNA, 22 nt, synthetic construct
  source 1..22: mol_type = other RNA
gacacctgaccgccgaccccac

SEQ ID NO: 628 - RNA, 22 nt, synthetic construct
  source 1..22: mol_type = other RNA
gaccccacctacctaagaacca

SEQ ID NO: 629 - RNA, 22 nt, synthetic construct
  source 1..22: mol_type = other RNA
gaccgccgaccccacctaccta

SEQ ID NO: 630 - RNA, 22 nt, synthetic construct
  source 1..22: mol_type = other RNA
gacgactggccagggcgcctgt

SEQ ID NO: 631 - RNA, 22 nt, synthetic construct
  source 1..22: mol_type = other RNA
gactggccagggcgcctgtggg

SEQ ID NO: 632 - RNA, 22 nt, synthetic construct
  source 1..22: mol_type = other RNA
gagaaggcggcactctggtggg

SEQ ID NO: 633 - RNA, 22 nt, synthetic construct
  source 1..22: mol_type = other RNA
gagcagccccaccagagtgccg

SEQ ID NO: 634 - RNA, 22 nt, synthetic construct
  source 1..22: mol_type = other RNA
gatcccacaggcgccctggcca

SEQ ID NO: 635 - RNA, 22 nt, synthetic construct
  source 1..22: mol_type = other RNA
gatctgcatgcctggagcagcc

SEQ ID NO: 636 - RNA, 22 nt, synthetic construct
  source 1..22: mol_type = other RNA
gatggttcttaggtaggtgggg

SEQ ID NO: 637 - RNA, 22 nt, synthetic construct
  source 1..22: mol_type = other RNA
gcaccgcccagacgactggcca

SEQ ID NO: 638 - RNA, 22 nt, synthetic construct
  source 1..22: mol_type = other RNA
gcactctggtggggctgctcca

SEQ ID NO: 639 - RNA, 22 nt, synthetic construct
  source 1..22: mol_type = other RNA
gcagatcccacaggcgccctgg

SEQ ID NO: 640 - RNA, 22 nt, synthetic construct
  source 1..22: mol_type = other RNA
gcagccccaccagagtgccgcc

SEQ ID NO: 641 - RNA, 22 nt, synthetic construct
  source 1..22: mol_type = other RNA
gcatgcagatcccacaggcgcc

SEQ ID NO: 642 - RNA, 22 nt, synthetic construct
  source 1..22: mol_type = other RNA
gcatgcctggagcagccccacc

SEQ ID NO: 643 - RNA, 22 nt, synthetic construct
  source 1..22: mol_type = other RNA
gccagcccagttgtagcaccgc

SEQ ID NO: 644 - RNA, 22 nt, synthetic construct
  source 1..22: mol_type = other RNA
gccaggatggttcttaggtagg

SEQ ID NO: 645 - RNA, 22 nt, synthetic construct
  source 1..22: mol_type = other RNA
gccagggcgcctgtgggatctg

SEQ ID NO: 646 - RNA, 22 nt, synthetic construct
  source 1..22: mol_type = other RNA
gccagtcgtctgggcggtgcta

SEQ ID NO: 647 - RNA, 22 nt, synthetic construct
  source 1..22: mol_type = other RNA
gcccagacgactggccagggcg

SEQ ID NO: 648 - RNA, 22 nt, synthetic construct
  source 1..22: mol_type = other RNA
gcccagttgtagcaccgcccag

SEQ ID NO: 649 - RNA, 22 nt, synthetic construct
  source 1..22: mol_type = other RNA
gccctggccagtcgtctgggcg

SEQ ID NO: 650 - RNA, 22 nt, synthetic construct
  source 1..22: mol_type = other RNA
gccgaccccacctacctaagaa

SEQ ID NO: 651 - RNA, 22 nt, synthetic construct
  source 1..22: mol_type = other RNA
gccgccagcccagttgtagcac

SEQ ID NO: 652 - RNA, 22 nt, synthetic construct
  source 1..22: mol_type = other RNA
gcctggagcagccccaccagag

SEQ ID NO: 653 - RNA, 22 nt, synthetic construct
  source 1..22: mol_type = other RNA
gcctgtgggatctgcatgcctg

SEQ ID NO: 654 - RNA, 22 nt, synthetic construct
  source 1..22: mol_type = other RNA
gcgccctggccagtcgtctggg

SEQ ID NO: 655 - RNA, 22 nt, synthetic construct
  source 1..22: mol_type = other RNA
gcgcctgtgggatctgcatgcc

SEQ ID NO: 656 - RNA, 22 nt, synthetic construct
  source 1..22: mol_type = other RNA
gcggcactctggtggggctgct

SEQ ID NO: 657 - RNA, 22 nt, synthetic construct
  source 1..22: mol_type = other RNA
gcggccaggatggttcttaggt

SEQ ID NO: 658 - RNA, 22 nt, synthetic construct
  source 1..22: mol_type = other RNA
gcggtgctacaactgggctggc

SEQ ID NO: 659 - RNA, 22 nt, synthetic construct
  source 1..22: mol_type = other RNA
gctacaactgggctggcggcca

SEQ ID NO: 660 - RNA, 22 nt, synthetic construct
  source 1..22: mol_type = other RNA
gctccaggcatgcagatcccac

SEQ ID NO: 661 - RNA, 22 nt, synthetic construct
  source 1..22: mol_type = other RNA
gctctgggacacctgaccgccg

SEQ ID NO: 662 - RNA, 22 nt, synthetic construct
  source 1..22: mol_type = other RNA
gctgctccaggcatgcagatcc

SEQ ID NO: 663 - RNA, 22 nt, synthetic construct
  source 1..22: mol_type = other RNA
gctggcggccaggatggttctt

SEQ ID NO: 664 - RNA, 22 nt, synthetic construct
  source 1..22: mol_type = other RNA
ggacacctgaccgccgacccca

SEQ ID NO: 665 - RNA, 22 nt, synthetic construct
  source 1..22: mol_type = other RNA
ggagaaggcggcactctggtgg

SEQ ID NO: 666 - RNA, 22 nt, synthetic construct
  source 1..22: mol_type = other RNA
ggagcagccccaccagagtgcc

SEQ ID NO: 667 - RNA, 22 nt, synthetic construct
  source 1..22: mol_type = other RNA
ggatctgcatgcctggagcagc

SEQ ID NO: 668 - RNA, 22 nt, synthetic construct
  source 1..22: mol_type = other RNA
ggatggttcttaggtaggtggg

SEQ ID NO: 669 - RNA, 22 nt, synthetic construct
  source 1..22: mol_type = other RNA
ggcactctggtggggctgctcc

SEQ ID NO: 670 - RNA, 22 nt, synthetic construct
  source 1..22: mol_type = other RNA
ggcatgcagatcccacaggcgc

SEQ ID NO: 671 - RNA, 22 nt, synthetic construct
  source 1..22: mol_type = other RNA
ggccaggatggttcttaggtag

SEQ ID NO: 672 - RNA, 22 nt, synthetic construct
  source 1..22: mol_type = other RNA
ggccagggcgcctgtgggatct

SEQ ID NO: 673 - RNA, 22 nt, synthetic construct
  source 1..22: mol_type = other RNA
ggccagtcgtctgggcggtgct

SEQ ID NO: 674 - RNA, 22 nt, synthetic construct
  source 1..22: mol_type = other RNA
ggccgccagcccagttgtagca

SEQ ID NO: 675 - RNA, 22 nt, synthetic construct
  source 1..22: mol_type = other RNA
ggcgccctggccagtcgtctgg

SEQ ID NO: 676 - RNA, 22 nt, synthetic construct
  source 1..22: mol_type = other RNA
ggcgcctgtgggatctgcatgc

SEQ ID NO: 677 - RNA, 22 nt, synthetic construct
  source 1..22: mol_type = other RNA
ggcggcactctggtggggctgc

SEQ ID NO: 678 - RNA, 22 nt, synthetic construct
  source 1..22: mol_type = other RNA
ggcggccaggatggttcttagg

SEQ ID NO: 679 - RNA, 22 nt, synthetic construct
  source 1..22: mol_type = other RNA
ggcggtgctacaactgggctgg

SEQ ID NO: 680 - RNA, 22 nt, synthetic construct
  source 1..22: mol_type = other RNA
ggctctgggacacctgaccgcc

SEQ ID NO: 681 - RNA, 22 nt, synthetic construct
  source 1..22: mol_type = other RNA
ggctgctccaggcatgcagatc

SEQ ID NO: 682 - RNA, 22 nt, synthetic construct
  source 1..22: mol_type = other RNA
ggctggcggccaggatggttct

SEQ ID NO: 683 - RNA, 22 nt, synthetic construct
  source 1..22: mol_type = other RNA
gggacacctgaccgccgacccc

SEQ ID NO: 684 - RNA, 22 nt, synthetic construct
  source 1..22: mol_type = other RNA
gggatctgcatgcctggagcag

SEQ ID NO: 685 - RNA, 22 nt, synthetic construct
  source 1..22: mol_type = other RNA
gggcgcctgtgggatctgcatg

SEQ ID NO: 686 - RNA, 22 nt, synthetic construct
  source 1..22: mol_type = other RNA
gggcggtgctacaactgggctg

SEQ ID NO: 687 - RNA, 22 nt, synthetic construct
  source 1..22: mol_type = other RNA
gggctgctccaggcatgcagat

SEQ ID NO: 688 - RNA, 22 nt, synthetic construct
  source 1..22: mol_type = other RNA
gggctggcggccaggatggttc

SEQ ID NO: 689 - RNA, 22 nt, synthetic construct
  source 1..22: mol_type = other RNA
ggggctgctccaggcatgcaga

SEQ ID NO: 690 - RNA, 22 nt, synthetic construct
  source 1..22: mol_type = other RNA
ggggtcggcggtcaggtgtccc

SEQ ID NO: 691 - RNA, 22 nt, synthetic construct
  source 1..22: mol_type = other RNA
gggtcggcggtcaggtgtccca

SEQ ID NO: 692 - RNA, 22 nt, synthetic construct
  source 1..22: mol_type = other RNA
ggtaggtggggtcggcggtcag

SEQ ID NO: 693 - RNA, 22 nt, synthetic construct
  source 1..22: mol_type = other RNA
ggtcggcggtcaggtgtcccag

SEQ ID NO: 694 - RNA, 22 nt, synthetic construct
  source 1..22: mol_type = other RNA
ggtgctacaactgggctggcgg

SEQ ID NO: 695 - RNA, 22 nt, synthetic construct
  source 1..22: mol_type = other RNA
ggtggggctgctccaggcatgc

SEQ ID NO: 696 - RNA, 22 nt, synthetic construct
  source 1..22: mol_type = other RNA
ggtggggtcggcggtcaggtgt

SEQ ID NO: 697 - RNA, 22 nt, synthetic construct
  source 1..22: mol_type = other RNA
ggttcttaggtaggtggggtcg

SEQ ID NO: 698 - RNA, 22 nt, synthetic construct
  source 1..22: mol_type = other RNA
gtagcaccgcccagacgactgg

SEQ ID NO: 699 - RNA, 22 nt, synthetic construct
  source 1..22: mol_type = other RNA
gtaggtggggtcggcggtcagg

SEQ ID NO: 700 - RNA, 22 nt, synthetic construct
  source 1..22: mol_type = other RNA
gtcggcggtcaggtgtcccaga

SEQ ID NO: 701 - RNA, 22 nt, synthetic construct
  source 1..22: mol_type = other RNA
gtcgtctgggcggtgctacaac

SEQ ID NO: 702 - RNA, 22 nt, synthetic construct
  source 1..22: mol_type = other RNA
gtctgggcggtgctacaactgg

SEQ ID NO: 703 - RNA, 22 nt, synthetic construct
  source 1..22: mol_type = other RNA
gtgctacaactgggctggcggc

SEQ ID NO: 704 - RNA, 22 nt, synthetic construct
  source 1..22: mol_type = other RNA
gtggagaaggcggcactctggt

SEQ ID NO: 705 - RNA, 22 nt, synthetic construct
  source 1..22: mol_type = other RNA
gtgggatctgcatgcctggagc

SEQ ID NO: 706 - RNA, 22 nt, synthetic construct
  source 1..22: mol_type = other RNA
gtggggctgctccaggcatgca

SEQ ID NO: 707 - RNA, 22 nt, synthetic construct
  source 1..22: mol_type = other RNA
gtggggtcggcggtcaggtgtc

SEQ ID NO: 708 - RNA, 22 nt, synthetic construct
  source 1..22: mol_type = other RNA
gttcttaggtaggtggggtcgg

SEQ ID NO: 709 - RNA, 22 nt, synthetic construct
  source 1..22: mol_type = other RNA
gttgtagcaccgcccagacgac

SEQ ID NO: 710 - RNA, 22 nt, synthetic construct
  source 1..22: mol_type = other RNA
taagaaccatcctggccgccag

SEQ ID NO: 711 - RNA, 22 nt, synthetic construct
  source 1..22: mol_type = other RNA
tacaactgggctggcggccagg

SEQ ID NO: 712 - RNA, 22 nt, synthetic construct
  source 1..22: mol_type = other RNA
tacctaagaaccatcctggccg

SEQ ID NO: 713 - RNA, 22 nt, synthetic construct
  source 1..22: mol_type = other RNA
tagcaccgcccagacgactggc

SEQ ID NO: 714 - RNA, 22 nt, synthetic construct
  source 1..22: mol_type = other RNA
taggtaggtggggtcggcggtc

SEQ ID NO: 715 - RNA, 22 nt, synthetic construct
  source 1..22: mol_type = other RNA
taggtggggtcggcggtcaggt

SEQ ID NO: 716 - RNA, 22 nt, synthetic construct
  source 1..22: mol_type = other RNA
tccaggcatgcagatcccacag

SEQ ID NO: 717 - RNA, 22 nt, synthetic construct
  source 1..22: mol_type = other RNA
tcccacaggcgccctggccagt

SEQ ID NO: 718 - RNA, 22 nt, synthetic construct
  source 1..22: mol_type = other RNA
tcctggccgccagcccagttgt

SEQ ID NO: 719 - RNA, 22 nt, synthetic construct
  source 1..22: mol_type = other RNA
tcgtctgggcggtgctacaact

SEQ ID NO: 720 - RNA, 22 nt, synthetic construct
  source 1..22: mol_type = other RNA
tctgcatgcctggagcagcccc

SEQ ID NO: 721 - RNA, 22 nt, synthetic construct
  source 1..22: mol_type = other RNA
tctgggacacctgaccgccgac

SEQ ID NO: 722 - RNA, 22 nt, synthetic construct
  source 1..22: mol_type = other RNA
tctgggcggtgctacaactggg

SEQ ID NO: 723 - RNA, 22 nt, synthetic construct
  source 1..22: mol_type = other RNA
tctggtggggctgctccaggca

SEQ ID NO: 724 - RNA, 22 nt, synthetic construct
  source 1..22: mol_type = other RNA
tcttaggtaggtggggtcggcg

SEQ ID NO: 725 - RNA, 22 nt, synthetic construct
  source 1..22: mol_type = other RNA
tgaccgccgaccccacctacct

SEQ ID NO: 726 - RNA, 22 nt, synthetic construct
  source 1..22: mol_type = other RNA
tgcagatcccacaggcgccctg

SEQ ID NO: 727 - RNA, 22 nt, synthetic construct
  source 1..22: mol_type = other RNA
tgcatgcctggagcagccccac

SEQ ID NO: 728 - RNA, 22 nt, synthetic construct
  source 1..22: mol_type = other RNA
tgcctggagcagccccaccaga

SEQ ID NO: 729 - RNA, 22 nt, synthetic construct
  source 1..22: mol_type = other RNA
tgctacaactgggctggcggcc

SEQ ID NO: 730 - RNA, 22 nt, synthetic construct
  source 1..22: mol_type = other RNA
tgctccaggcatgcagatccca

SEQ ID NO: 731 - RNA, 22 nt, synthetic construct
  source 1..22: mol_type = other RNA
tggagaaggcggcactctggtg

SEQ ID NO: 732 - RNA, 22 nt, synthetic construct
  source 1..22: mol_type = other RNA
tggagcagccccaccagagtgc

SEQ ID NO: 733 - RNA, 22 nt, synthetic construct
  source 1..22: mol_type = other RNA
tggccagggcgcctgtgggatc

SEQ ID NO: 734 - RNA, 22 nt, synthetic construct
  source 1..22: mol_type = other RNA
tggccagtcgtctgggcggtgc

SEQ ID NO: 735 - RNA, 22 nt, synthetic construct
  source 1..22: mol_type = other RNA
tggccgccagcccagttgtagc

SEQ ID NO: 736 - RNA, 22 nt, synthetic construct
  source 1..22: mol_type = other RNA
tggcggccaggatggttcttag

SEQ ID NO: 737 - RNA, 22 nt, synthetic construct
  source 1..22: mol_type = other RNA
tggctctgggacacctgaccgc

SEQ ID NO: 738 - RNA, 22 nt, synthetic construct
  source 1..22: mol_type = other RNA
tgggacacctgaccgccgaccc

SEQ ID NO: 739 - RNA, 22 nt, synthetic construct
  source 1..22: mol_type = other RNA
tgggatctgcatgcctggagca

SEQ ID NO: 740 - RNA, 22 nt, synthetic construct
  source 1..22: mol_type = other RNA
tgggcggtgctacaactgggct

SEQ ID NO: 741 - RNA, 22 nt, synthetic construct
  source 1..22: mol_type = other RNA
tgggctggcggccaggatggtt

SEQ ID NO: 742 - RNA, 22 nt, synthetic construct
  source 1..22: mol_type = other RNA
tggggctgctccaggcatgcag

SEQ ID NO: 743 - RNA, 22 nt, synthetic construct
  source 1..22: mol_type = other RNA
tggggtcggcggtcaggtgtcc

SEQ ID NO: 744 - RNA, 22 nt, synthetic construct
  source 1..22: mol_type = other RNA
tggtggggctgctccaggcatg

SEQ ID NO: 745 - RNA, 22 nt, synthetic construct
  source 1..22: mol_type = other RNA
tggttcttaggtaggtggggtc

SEQ ID NO: 746 - RNA, 22 nt, synthetic construct
  source 1..22: mol_type = other RNA
tgtagcaccgcccagacgactg

SEQ ID NO: 747 - RNA, 22 nt, synthetic construct
  source 1..22: mol_type = other RNA
tgtgggatctgcatgcctggag

SEQ ID NO: 748 - RNA, 22 nt, synthetic construct
  source 1..22: mol_type = other RNA
ttaggtaggtggggtcggcggt

SEQ ID NO: 749 - RNA, 22 nt, synthetic construct
  source 1..22: mol_type = other RNA
ttcttaggtaggtggggtcggc

SEQ ID NO: 750 - RNA, 22 nt, synthetic construct
  source 1..22: mol_type = other RNA
ttgtagcaccgcccagacgact

SEQ ID NO: 751 - RNA, 20 nt, synthetic construct
  source 1..20: mol_type = other RNA
aaactggtaccgcatgagcc

SEQ ID NO: 752 - RNA, 20 nt, synthetic construct
  source 1..20: mol_type = other RNA
aaagagagcctgcgggcaga

SEQ ID NO: 753 - RNA, 20 nt, synthetic construct
  source 1..20: mol_type = other RNA
aacacatcggagagcttcgt

SEQ ID NO: 754 - RNA, 20 nt, synthetic construct
  source 1..20: mol_type = other RNA
aaccagacggacaagctggc

SEQ ID NO: 755 - RNA, 20 nt, synthetic construct
  source 1..20: mol_type = other RNA
aacgccaccttcacctgcag

SEQ ID NO: 756 - RNA, 20 nt, synthetic construct
  source 1..20: mol_type = other RNA
aacgggcgtgacttccacat

SEQ ID NO: 757 - RNA, 20 nt, synthetic construct
  source 1..20: mol_type = other RNA
aactgcccaacgggcgtgac

SEQ ID NO: 758 - RNA, 20 nt, synthetic construct
  source 1..20: mol_type = other RNA
aactggtaccgcatgagccc

SEQ ID NO: 759 - RNA, 20 nt, synthetic construct
  source 1..20: mol_type = other RNA
aagagagcctgcgggcagag

SEQ ID NO: 760 - RNA, 20 nt, synthetic construct
  source 1..20: mol_type = other RNA
aagcggcagtcctggccggg

SEQ ID NO: 761 - RNA, 20 nt, synthetic construct
  source 1..20: mol_type = other RNA
aagctctccgatgtgttgga

SEQ ID NO: 762 - RNA, 20 nt, synthetic construct
  source 1..20: mol_type = other RNA
aagctgcaggtgaaggtggc

SEQ ID NO: 763 - RNA, 20 nt, synthetic construct
  source 1..20: mol_type = other RNA
aagctggccgccttccccga

SEQ ID NO: 764 - RNA, 20 nt, synthetic construct
  source 1..20: mol_type = other RNA
aaggcgcagatcaaagagag

SEQ ID NO: 765 - RNA, 20 nt, synthetic construct
  source 1..20: mol_type = other RNA
aaggcggccagcttgtccgt

SEQ ID NO: 766 - RNA, 20 nt, synthetic construct
  source 1..20: mol_type = other RNA
aaggggacaacgccaccttc

SEQ ID NO: 767 - RNA, 20 nt, synthetic construct
  source 1..20: mol_type = other RNA
aaggtggcgttgtccccttc

SEQ ID NO: 768 - RNA, 20 nt, synthetic construct
  source 1..20: mol_type = other RNA
aagtcacgcccgttgggcag

SEQ ID NO: 769 - RNA, 20 nt, synthetic construct
  source 1..20: mol_type = other RNA
aatgacagcggcacctacct

SEQ ID NO: 770 - RNA, 20 nt, synthetic construct
  source 1..20: mol_type = other RNA
acaacgccaccttcacctgc

SEQ ID NO: 771 - RNA, 20 nt, synthetic construct
  source 1..20: mol_type = other RNA
acaactgcccaacgggcgtg

SEQ ID NO: 772 - RNA, 20 nt, synthetic construct
  source 1..20: mol_type = other RNA
acaagctggccgccttcccc

SEQ ID NO: 773 - RNA, 20 nt, synthetic construct
  source 1..20: mol_type = other RNA
acacaactgcccaacgggcg

SEQ ID NO: 774 - RNA, 20 nt, synthetic construct
  source 1..20: mol_type = other RNA
acacatcggagagcttcgtg

SEQ ID NO: 775 - RNA, 20 nt, synthetic construct
  source 1..20: mol_type = other RNA
acacggaagcggcagtcctg

SEQ ID NO: 776 - RNA, 20 nt, synthetic construct
  source 1..20: mol_type = other RNA
acagaggtaggtgccgctgt

SEQ ID NO: 777 - RNA, 20 nt, synthetic construct
  source 1..20: mol_type = other RNA
acagcggcacctacctctgt

SEQ ID NO: 778 - RNA, 20 nt, synthetic construct
  source 1..20: mol_type = other RNA
acaggtgcggcctcggaggc

SEQ ID NO: 779 - RNA, 20 nt, synthetic construct
  source 1..20: mol_type = other RNA
acatcggagagcttcgtgct

SEQ ID NO: 780 - RNA, 20 nt, synthetic construct
  source 1..20: mol_type = other RNA
acatgagcgtggtcagggcc

SEQ ID NO: 781 - RNA, 20 nt, synthetic construct
  source 1..20: mol_type = other RNA
accacgagcagggctgggga

SEQ ID NO: 782 - RNA, 20 nt, synthetic construct
  source 1..20: mol_type = other RNA
accacgctcatgtggaagtc

SEQ ID NO: 783 - RNA, 20 nt, synthetic construct
  source 1..20: mol_type = other RNA
accagacggacaagctggcc

SEQ ID NO: 784 - RNA, 20 nt, synthetic construct
  source 1..20: mol_type = other RNA
accagtttagcacgaagctc

SEQ ID NO: 785 - RNA, 20 nt, synthetic construct
  source 1..20: mol_type = other RNA
acccagccccttcctcacct

SEQ ID NO: 786 - RNA, 20 nt, synthetic construct
  source 1..20: mol_type = other RNA
accctgagctctgcccgcag

SEQ ID NO: 787 - RNA, 20 nt, synthetic construct
  source 1..20: mol_type = other RNA
accgaaggggacaacgccac

SEQ ID NO: 788 - RNA, 20 nt, synthetic construct
  source 1..20: mol_type = other RNA
accgcagccagcccggccag

SEQ ID NO: 789 - RNA, 20 nt, synthetic construct
  source 1..20: mol_type = other RNA
accgcatgagccccagcaac

SEQ ID NO: 790 - RNA, 20 nt, synthetic construct
  source 1..20: mol_type = other RNA
acctacctctgtggggccat

SEQ ID NO: 791 - RNA, 20 nt, synthetic construct
  source 1..20: mol_type = other RNA
acctctctccatctctcaga

SEQ ID NO: 792 - RNA, 20 nt, synthetic construct
  source 1..20: mol_type = other RNA
acctctgtggggccatctcc

SEQ ID NO: 793 - RNA, 20 nt, synthetic construct
  source 1..20: mol_type = other RNA
acctgcagcttctccaacac

SEQ ID NO: 794 - RNA, 20 nt, synthetic construct
  source 1..20: mol_type = other RNA
acctgtcaccctgagctctg

SEQ ID NO: 795 - RNA, 20 nt, synthetic construct
  source 1..20: mol_type = other RNA
accttcacctgcagcttctc

SEQ ID NO: 796 - RNA, 20 nt, synthetic construct
  source 1..20: mol_type = other RNA
accttctccccagccctgct

SEQ ID NO: 797 - RNA, 20 nt, synthetic construct
  source 1..20: mol_type = other RNA
acgaagctctccgatgtgtt

SEQ ID NO: 798 - RNA, 20 nt, synthetic construct
  source 1..20: mol_type = other RNA
acgagcagggctggggagaa

SEQ ID NO: 799 - RNA, 20 nt, synthetic construct
  source 1..20: mol_type = other RNA
acgccaccttcacctgcagc

SEQ ID NO: 800 - RNA, 20 nt, synthetic construct
  source 1..20: mol_type = other RNA
acgcccgttgggcagttgtg

SEQ ID NO: 801 - RNA, 20 nt, synthetic construct
  source 1..20: mol_type = other RNA
acgctcatgtggaagtcacg

SEQ ID NO: 802 - RNA, 20 nt, synthetic construct
  source 1..20: mol_type = other RNA
acggaagcggcagtcctggc

SEQ ID NO: 803 - RNA, 20 nt, synthetic construct
  source 1..20: mol_type = other RNA
acggacaagctggccgcctt

SEQ ID NO: 804 - RNA, 20 nt, synthetic construct
  source 1..20: mol_type = other RNA
acgggcgtgacttccacatg

SEQ ID NO: 805 - RNA, 20 nt, synthetic construct
  source 1..20: mol_type = other RNA
actccccagacaggccctgg

SEQ ID NO: 806 - RNA, 20 nt, synthetic construct
  source 1..20: mol_type = other RNA
actgcccaacgggcgtgact

SEQ ID NO: 807 - RNA, 20 nt, synthetic construct
  source 1..20: mol_type = other RNA
actgccgcttccgtgtcaca

SEQ ID NO: 808 - RNA, 20 nt, synthetic construct
  source 1..20: mol_type = other RNA
actggtaccgcatgagcccc

SEQ ID NO: 809 - RNA, 20 nt, synthetic construct
  source 1..20: mol_type = other RNA
acttccacatgagcgtggtc

SEQ ID NO: 810 - RNA, 20 nt, synthetic construct
  source 1..20: mol_type = other RNA
agaagctgcaggtgaaggtg

SEQ ID NO: 811 - RNA, 20 nt, synthetic construct
  source 1..20: mol_type = other RNA
agacaggccctggaaccccc

SEQ ID NO: 812 - RNA, 20 nt, synthetic construct
  source 1..20: mol_type = other RNA
agacggacaagctggccgcc

SEQ ID NO: 813 - RNA, 20 nt, synthetic construct
  source 1..20: mol_type = other RNA
agactccccagacaggccct

SEQ ID NO: 814 - RNA, 20 nt, synthetic construct
  source 1..20: mol_type = other RNA
agagagcctgcgggcagagc

SEQ ID NO: 815 - RNA, 20 nt, synthetic construct
  source 1..20: mol_type = other RNA
agagatggagagaggtgagg

SEQ ID NO: 816 - RNA, 20 nt, synthetic construct
  source 1..20: mol_type = other RNA
agagcctgcgggcagagctc

SEQ ID NO: 817 - RNA, 20 nt, synthetic construct
  source 1..20: mol_type = other RNA
agagctcagggtgacaggtg

SEQ ID NO: 818 - RNA, 20 nt, synthetic construct
  source 1..20: mol_type = other RNA
agagcttcgtgctaaactgg

SEQ ID NO: 819 - RNA, 20 nt, synthetic construct
  source 1..20: mol_type = other RNA
agaggtaggtgccgctgtca

SEQ ID NO: 820 - RNA, 20 nt, synthetic construct
  source 1..20: mol_type = other RNA
agatcaaagagagcctgcgg

SEQ ID NO: 821 - RNA, 20 nt, synthetic construct
  source 1..20: mol_type = other RNA
agatggagagaggtgaggaa

SEQ ID NO: 822 - RNA, 20 nt, synthetic construct
  source 1..20: mol_type = other RNA
agatggccccacagaggtag

SEQ ID NO: 823 - RNA, 20 nt, synthetic construct
  source 1..20: mol_type = other RNA
agcaaccagacggacaagct

SEQ ID NO: 824 - RNA, 20 nt, synthetic construct
  source 1..20: mol_type = other RNA
agcacgaagctctccgatgt

SEQ ID NO: 825 - RNA, 20 nt, synthetic construct
  source 1..20: mol_type = other RNA
agcagggctggggagaaggt

SEQ ID NO: 826 - RNA, 20 nt, synthetic construct
  source 1..20: mol_type = other RNA
agccagcccggccaggactg

SEQ ID NO: 827 - RNA, 20 nt, synthetic construct
  source 1..20: mol_type = other RNA
agccccagcaaccagacgga

SEQ ID NO: 828 - RNA, 20 nt, synthetic construct
  source 1..20: mol_type = other RNA
agccccttcctcacctctct

SEQ ID NO: 829 - RNA, 20 nt, synthetic construct
  source 1..20: mol_type = other RNA
agcccggccaggactgccgc

SEQ ID NO: 830 - RNA, 20 nt, synthetic construct
  source 1..20: mol_type = other RNA
agccctgctcgtggtgaccg

SEQ ID NO: 831 - RNA, 20 nt, synthetic construct
  source 1..20: mol_type = other RNA
agcctgcgggcagagctcag

SEQ ID NO: 832 - RNA, 20 nt, synthetic construct
  source 1..20: mol_type = other RNA
agcggcacctacctctgtgg

SEQ ID NO: 833 - RNA, 20 nt, synthetic construct
  source 1..20: mol_type = other RNA
agcggcagtcctggccgggc

SEQ ID NO: 834 - RNA, 20 nt, synthetic construct
  source 1..20: mol_type = other RNA
agcgtggtcagggcccggcg

SEQ ID NO: 835 - RNA, 20 nt, synthetic construct
  source 1..20: mol_type = other RNA
agctcacccctgccccgggg

SEQ ID NO: 836 - RNA, 20 nt, synthetic construct
  source 1..20: mol_type = other RNA
agctcagggtgacaggtgcg

SEQ ID NO: 837 - RNA, 20 nt, synthetic construct
  source 1..20: mol_type = other RNA
agctctccgatgtgttggag

SEQ ID NO: 838 - RNA, 20 nt, synthetic construct
  source 1..20: mol_type = other RNA
agctctgcccgcaggctctc

SEQ ID NO: 839 - RNA, 20 nt, synthetic construct
  source 1..20: mol_type = other RNA
agctgcaggtgaaggtggcg

SEQ ID NO: 840 - RNA, 20 nt, synthetic construct
  source 1..20: mol_type = other RNA
agctggccgccttccccgag

SEQ ID NO: 841 - RNA, 20 nt, synthetic construct
  source 1..20: mol_type = other RNA
agcttcgtgctaaactggta

SEQ ID NO: 842 - RNA, 20 nt, synthetic construct
  source 1..20: mol_type = other RNA
agcttctccaacacatcgga

SEQ ID NO: 843 - RNA, 20 nt, synthetic construct
  source 1..20: mol_type = other RNA
agcttgtccgtctggttgct

SEQ ID NO: 844 - RNA, 20 nt, synthetic construct
  source 1..20: mol_type = other RNA
aggaccgcagccagcccggc

SEQ ID NO: 845 - RNA, 20 nt, synthetic construct
  source 1..20: mol_type = other RNA
aggactgccgcttccgtgtc

SEQ ID NO: 846 - RNA, 20 nt, synthetic construct
  source 1..20: mol_type = other RNA
aggccgcacctgtcaccctg

SEQ ID NO: 847 - RNA, 20 nt, synthetic construct
  source 1..20: mol_type = other RNA
aggcgcagatcaaagagagc

SEQ ID NO: 848 - RNA, 20 nt, synthetic construct
  source 1..20: mol_type = other RNA
aggcggccagcttgtccgtc

SEQ ID NO: 849 - RNA, 20 nt, synthetic construct
  source 1..20: mol_type = other RNA
aggctctctttgatctgcgc

SEQ ID NO: 850 - RNA, 20 nt, synthetic construct
  source 1..20: mol_type = other RNA
agggagatggccccacagag

SEQ ID NO: 851 - RNA, 20 nt, synthetic construct
  source 1..20: mol_type = other RNA
agggcccggcgcaatgacag

SEQ ID NO: 852 - RNA, 20 nt, synthetic construct
  source 1..20: mol_type = other RNA
agggcctgtctggggagtct

SEQ ID NO: 853 - RNA, 20 nt, synthetic construct
  source 1..20: mol_type = other RNA
agggctggggagaaggtggg

SEQ ID NO: 854 - RNA, 20 nt, synthetic construct
  source 1..20: mol_type = other RNA
aggggacaacgccaccttca

SEQ ID NO: 855 - RNA, 20 nt, synthetic construct
  source 1..20: mol_type = other RNA
agggtgacaggtgcggcctc

SEQ ID NO: 856 - RNA, 20 nt, synthetic construct
  source 1..20: mol_type = other RNA
aggtaggtgccgctgtcatt

SEQ ID NO: 857 - RNA, 20 nt, synthetic construct
  source 1..20: mol_type = other RNA
aggtgaaggtggcgttgtcc

SEQ ID NO: 858 - RNA, 20 nt, synthetic construct
  source 1..20: mol_type = other RNA
aggtgccgctgtcattgcgc

SEQ ID NO: 859 - RNA, 20 nt, synthetic construct
  source 1..20: mol_type = other RNA
aggtgcggcctcggaggccc

SEQ ID NO: 860 - RNA, 20 nt, synthetic construct
  source 1..20: mol_type = other RNA
aggtggcgttgtccccttcg

SEQ ID NO: 861 - RNA, 20 nt, synthetic construct
  source 1..20: mol_type = other RNA
agtcacgcccgttgggcagt

SEQ ID NO: 862 - RNA, 20 nt, synthetic construct
  source 1..20: mol_type = other RNA
agtcctggccgggctggctg

SEQ ID NO: 863 - RNA, 20 nt, synthetic construct
  source 1..20: mol_type = other RNA
agtctgagagatggagagag

SEQ ID NO: 864 - RNA, 20 nt, synthetic construct
  source 1..20: mol_type = other RNA
agttgtgtgacacggaagcg

SEQ ID NO: 865 - RNA, 20 nt, synthetic construct
  source 1..20: mol_type = other RNA
agtttagcacgaagctctcc

SEQ ID NO: 866 - RNA, 20 nt, synthetic construct
  source 1..20: mol_type = other RNA
atcaaagagagcctgcgggc

SEQ ID NO: 867 - RNA, 20 nt, synthetic construct
  source 1..20: mol_type = other RNA
atcggagagcttcgtgctaa

SEQ ID NO: 868 - RNA, 20 nt, synthetic construct
  source 1..20: mol_type = other RNA
atctccctggcccccaaggc

SEQ ID NO: 869 - RNA, 20 nt, synthetic construct
  source 1..20: mol_type = other RNA
atctctcagactccccagac

SEQ ID NO: 870 - RNA, 20 nt, synthetic construct
  source 1..20: mol_type = other RNA
atctgcgccttgggggccag

SEQ ID NO: 871 - RNA, 20 nt, synthetic construct
  source 1..20: mol_type = other RNA
atgacagcggcacctacctc

SEQ ID NO: 872 - RNA, 20 nt, synthetic construct
  source 1..20: mol_type = other RNA
atgagccccagcaaccagac

SEQ ID NO: 873 - RNA, 20 nt, synthetic construct
  source 1..20: mol_type = other RNA
atgagcgtggtcagggcccg

SEQ ID NO: 874 - RNA, 20 nt, synthetic construct
  source 1..20: mol_type = other RNA
atgcggtaccagtttagcac

SEQ ID NO: 875 - RNA, 20 nt, synthetic construct
  source 1..20: mol_type = other RNA
atggagagaggtgaggaagg

SEQ ID NO: 876 - RNA, 20 nt, synthetic construct
  source 1..20: mol_type = other RNA
atggccccacagaggtaggt

SEQ ID NO: 877 - RNA, 20 nt, synthetic construct
  source 1..20: mol_type = other RNA
atgtggaagtcacgcccgtt

SEQ ID NO: 878 - RNA, 20 nt, synthetic construct
  source 1..20: mol_type = other RNA
atgtgttggagaagctgcag

SEQ ID NO: 879 - RNA, 20 nt, synthetic construct
  source 1..20: mol_type = other RNA
attgcgccgggccctgacca

SEQ ID NO: 880 - RNA, 20 nt, synthetic construct
  source 1..20: mol_type = other RNA
caaagagagcctgcgggcag

SEQ ID NO: 881 - RNA, 20 nt, synthetic construct
  source 1..20: mol_type = other RNA
caacacatcggagagcttcg

SEQ ID NO: 882 - RNA, 20 nt, synthetic construct
  source 1..20: mol_type = other RNA
caaccagacggacaagctgg

SEQ ID NO: 883 - RNA, 20 nt, synthetic construct
  source 1..20: mol_type = other RNA
caacgccaccttcacctgca

SEQ ID NO: 884 - RNA, 20 nt, synthetic construct
  source 1..20: mol_type = other RNA
caacgggcgtgacttccaca

SEQ ID NO: 885 - RNA, 20 nt, synthetic construct
  source 1..20: mol_type = other RNA
caactgcccaacgggcgtga

SEQ ID NO: 886 - RNA, 20 nt, synthetic construct
  source 1..20: mol_type = other RNA
caagctggccgccttccccg

SEQ ID NO: 887 - RNA, 20 nt, synthetic construct
  source 1..20: mol_type = other RNA
caaggcgcagatcaaagaga

SEQ ID NO: 888 - RNA, 20 nt, synthetic construct
  source 1..20: mol_type = other RNA
caatgacagcggcacctacc

SEQ ID NO: 889 - RNA, 20 nt, synthetic construct
  source 1..20: mol_type = other RNA
cacaactgcccaacgggcgt

SEQ ID NO: 890 - RNA, 20 nt, synthetic construct
  source 1..20: mol_type = other RNA
cacacaactgcccaacgggc

SEQ ID NO: 891 - RNA, 20 nt, synthetic construct
  source 1..20: mol_type = other RNA
cacagaggtaggtgccgctg

SEQ ID NO: 892 - RNA, 20 nt, synthetic construct
  source 1..20: mol_type = other RNA
cacatcggagagcttcgtgc

SEQ ID NO: 893 - RNA, 20 nt, synthetic construct
  source 1..20: mol_type = other RNA
cacatgagcgtggtcagggc

SEQ ID NO: 894 - RNA, 20 nt, synthetic construct
  source 1..20: mol_type = other RNA
caccacgagcagggctgggg

SEQ ID NO: 895 - RNA, 20 nt, synthetic construct
  source 1..20: mol_type = other RNA
cacccagccccttcctcacc

SEQ ID NO: 896 - RNA, 20 nt, synthetic construct
  source 1..20: mol_type = other RNA
caccctgagctctgcccgca

SEQ ID NO: 897 - RNA, 20 nt, synthetic construct
  source 1..20: mol_type = other RNA
cacctacctctgtggggcca

SEQ ID NO: 898 - RNA, 20 nt, synthetic construct
  source 1..20: mol_type = other RNA
cacctctctccatctctcag

SEQ ID NO: 899 - RNA, 20 nt, synthetic construct
  source 1..20: mol_type = other RNA
cacctgcagcttctccaaca

SEQ ID NO: 900 - RNA, 20 nt, synthetic construct
  source 1..20: mol_type = other RNA
cacctgtcaccctgagctct

SEQ ID NO: 901 - RNA, 20 nt, synthetic construct
  source 1..20: mol_type = other RNA
caccttcacctgcagcttct

SEQ ID NO: 902 - RNA, 20 nt, synthetic construct
  source 1..20: mol_type = other RNA
caccttctccccagccctgc

SEQ ID NO: 903 - RNA, 20 nt, synthetic construct
  source 1..20: mol_type = other RNA
cacgaagctctccgatgtgt

SEQ ID NO: 904 - RNA, 20 nt, synthetic construct
  source 1..20: mol_type = other RNA
cacgagcagggctggggaga

SEQ ID NO: 905 - RNA, 20 nt, synthetic construct
  source 1..20: mol_type = other RNA
cacgcccgttgggcagttgt

SEQ ID NO: 906 - RNA, 20 nt, synthetic construct
  source 1..20: mol_type = other RNA
cacgctcatgtggaagtcac

SEQ ID NO: 907 - RNA, 20 nt, synthetic construct
  source 1..20: mol_type = other RNA
cacggaagcggcagtcctgg

SEQ ID NO: 908 - RNA, 20 nt, synthetic construct
  source 1..20: mol_type = other RNA
cagacaggccctggaacccc

SEQ ID NO: 909 - RNA, 20 nt, synthetic construct
  source 1..20: mol_type = other RNA
cagacggacaagctggccgc

SEQ ID NO: 910 - RNA, 20 nt, synthetic construct
  source 1..20: mol_type = other RNA
cagactccccagacaggccc

SEQ ID NO: 911 - RNA, 20 nt, synthetic construct
  source 1..20: mol_type = other RNA
cagagctcagggtgacaggt

SEQ ID NO: 912 - RNA, 20 nt, synthetic construct
  source 1..20: mol_type = other RNA
cagaggtaggtgccgctgtc

SEQ ID NO: 913 - RNA, 20 nt, synthetic construct
  source 1..20: mol_type = other RNA
cagatcaaagagagcctgcg

SEQ ID NO: 914 - RNA, 20 nt, synthetic construct
  source 1..20: mol_type = other RNA
cagcaaccagacggacaagc

SEQ ID NO: 915 - RNA, 20 nt, synthetic construct
  source 1..20: mol_type = other RNA
cagccagcccggccaggact

SEQ ID NO: 916 - RNA, 20 nt, synthetic construct
  source 1..20: mol_type = other RNA
cagccccttcctcacctctc

SEQ ID NO: 917 - RNA, 20 nt, synthetic construct
  source 1..20: mol_type = other RNA
cagcccggccaggactgccg

SEQ ID NO: 918 - RNA, 20 nt, synthetic construct
  source 1..20: mol_type = other RNA
cagccctgctcgtggtgacc

SEQ ID NO: 919 - RNA, 20 nt, synthetic construct
  source 1..20: mol_type = other RNA
cagcggcacctacctctgtg

SEQ ID NO: 920 - RNA, 20 nt, synthetic construct
  source 1..20: mol_type = other RNA
cagctcacccctgccccggg

SEQ ID NO: 921 - RNA, 20 nt, synthetic construct
  source 1..20: mol_type = other RNA
cagcttctccaacacatcgg

SEQ ID NO: 922 - RNA, 20 nt, synthetic construct
  source 1..20: mol_type = other RNA
cagcttgtccgtctggttgc

SEQ ID NO: 923 - RNA, 20 nt, synthetic construct
  source 1..20: mol_type = other RNA
caggactgccgcttccgtgt

SEQ ID NO: 924 - RNA, 20 nt, synthetic construct
  source 1..20: mol_type = other RNA
caggctctctttgatctgcg

SEQ ID NO: 925 - RNA, 20 nt, synthetic construct
  source 1..20: mol_type = other RNA
cagggagatggccccacaga

SEQ ID NO: 926 - RNA, 20 nt, synthetic construct
  source 1..20: mol_type = other RNA
cagggcccggcgcaatgaca

SEQ ID NO: 927 - RNA, 20 nt, synthetic construct
  source 1..20: mol_type = other RNA
cagggcctgtctggggagtc

SEQ ID NO: 928 - RNA, 20 nt, synthetic construct
  source 1..20: mol_type = other RNA
cagggctggggagaaggtgg

SEQ ID NO: 929 - RNA, 20 nt, synthetic construct
  source 1..20: mol_type = other RNA
cagggtgacaggtgcggcct

SEQ ID NO: 930 - RNA, 20 nt, synthetic construct
  source 1..20: mol_type = other RNA
caggtgaaggtggcgttgtc

SEQ ID NO: 931 - RNA, 20 nt, synthetic construct
  source 1..20: mol_type = other RNA
caggtgcggcctcggaggcc

SEQ ID NO: 932 - RNA, 20 nt, synthetic construct
  source 1..20: mol_type = other RNA
cagtcctggccgggctggct

SEQ ID NO: 933 - RNA, 20 nt, synthetic construct
  source 1..20: mol_type = other RNA
cagttgtgtgacacggaagc

SEQ ID NO: 934 - RNA, 20 nt, synthetic construct
  source 1..20: mol_type = other RNA
cagtttagcacgaagctctc

SEQ ID NO: 935 - RNA, 20 nt, synthetic construct
  source 1..20: mol_type = other RNA
catcggagagcttcgtgcta

SEQ ID NO: 936 - RNA, 20 nt, synthetic construct
  source 1..20: mol_type = other RNA
catctccctggcccccaagg

SEQ ID NO: 937 - RNA, 20 nt, synthetic construct
  source 1..20: mol_type = other RNA
catctctcagactccccaga

SEQ ID NO: 938 - RNA, 20 nt, synthetic construct
  source 1..20: mol_type = other RNA
catgagccccagcaaccaga

SEQ ID NO: 939 - RNA, 20 nt, synthetic construct
  source 1..20: mol_type = other RNA
catgagcgtggtcagggccc

SEQ ID NO: 940 - RNA, 20 nt, synthetic construct
  source 1..20: mol_type = other RNA
catgcggtaccagtttagca

SEQ ID NO: 941 - RNA, 20 nt, synthetic construct
  source 1..20: mol_type = other RNA
catgtggaagtcacgcccgt

SEQ ID NO: 942 - RNA, 20 nt, synthetic construct
  source 1..20: mol_type = other RNA
cattgcgccgggccctgacc

SEQ ID NO: 943 - RNA, 20 nt, synthetic construct
  source 1..20: mol_type = other RNA
ccaacacatcggagagcttc

SEQ ID NO: 944 - RNA, 20 nt, synthetic construct
  source 1..20: mol_type = other RNA
ccaacgggcgtgacttccac

SEQ ID NO: 945 - RNA, 20 nt, synthetic construct
  source 1..20: mol_type = other RNA
ccaaggcgcagatcaaagag

SEQ ID NO: 946 - RNA, 20 nt, synthetic construct
  source 1..20: mol_type = other RNA
ccacagaggtaggtgccgct

SEQ ID NO: 947 - RNA, 20 nt, synthetic construct
  source 1..20: mol_type = other RNA
ccacatgagcgtggtcaggg

SEQ ID NO: 948 - RNA, 20 nt, synthetic construct
  source 1..20: mol_type = other RNA
ccacccagccccttcctcac

SEQ ID NO: 949 - RNA, 20 nt, synthetic construct
  source 1..20: mol_type = other RNA
ccaccttcacctgcagcttc

SEQ ID NO: 950 - RNA, 20 nt, synthetic construct
  source 1..20: mol_type = other RNA
ccaccttctccccagccctg

SEQ ID NO: 951 - RNA, 20 nt, synthetic construct
  source 1..20: mol_type = other RNA
ccacgagcagggctggggag

SEQ ID NO: 952 - RNA, 20 nt, synthetic construct
  source 1..20: mol_type = other RNA
ccacgctcatgtggaagtca

SEQ ID NO: 953 - RNA, 20 nt, synthetic construct
  source 1..20: mol_type = other RNA
ccagacaggccctggaaccc

SEQ ID NO: 954 - RNA, 20 nt, synthetic construct
  source 1..20: mol_type = other RNA
ccagacggacaagctggccg

SEQ ID NO: 955 - RNA, 20 nt, synthetic construct
  source 1..20: mol_type = other RNA
ccagcaaccagacggacaag

SEQ ID NO: 956 - RNA, 20 nt, synthetic construct
  source 1..20: mol_type = other RNA
ccagccccttcctcacctct

SEQ ID NO: 957 - RNA, 20 nt, synthetic construct
  source 1..20: mol_type = other RNA
ccagcccggccaggactgcc

SEQ ID NO: 958 - RNA, 20 nt, synthetic construct
  source 1..20: mol_type = other RNA
ccagccctgctcgtggtgac

SEQ ID NO: 959 - RNA, 20 nt, synthetic construct
  source 1..20: mol_type = other RNA
ccagcttgtccgtctggttg

SEQ ID NO: 960 - RNA, 20 nt, synthetic construct
  source 1..20: mol_type = other RNA
ccaggactgccgcttccgtg

SEQ ID NO: 961 - RNA, 20 nt, synthetic construct
  source 1..20: mol_type = other RNA
ccagggagatggccccacag

SEQ ID NO: 962 - RNA, 20 nt, synthetic construct
  source 1..20: mol_type = other RNA
ccagggcctgtctggggagt

SEQ ID NO: 963 - RNA, 20 nt, synthetic construct
  source 1..20: mol_type = other RNA
ccagtttagcacgaagctct

SEQ ID NO: 964 - RNA, 20 nt, synthetic construct
  source 1..20: mol_type = other RNA
ccatctccctggcccccaag

SEQ ID NO: 965 - RNA, 20 nt, synthetic construct
  source 1..20: mol_type = other RNA
ccatctctcagactccccag

SEQ ID NO: 966 - RNA, 20 nt, synthetic construct
  source 1..20: mol_type = other RNA
cccaacgggcgtgacttcca

SEQ ID NO: 967 - RNA, 20 nt, synthetic construct
  source 1..20: mol_type = other RNA
cccaaggcgcagatcaaaga

SEQ ID NO: 968 - RNA, 20 nt, synthetic construct
  source 1..20: mol_type = other RNA
cccacagaggtaggtgccgc

SEQ ID NO: 969 - RNA, 20 nt, synthetic construct
  source 1..20: mol_type = other RNA
cccaccttctccccagccct

SEQ ID NO: 970 - RNA, 20 nt, synthetic construct
  source 1..20: mol_type = other RNA
cccagacaggccctggaacc

SEQ ID NO: 971 - RNA, 20 nt, synthetic construct
  source 1..20: mol_type = other RNA
cccagcaaccagacggacaa

SEQ ID NO: 972 - RNA, 20 nt, synthetic construct
  source 1..20: mol_type = other RNA
cccagccccttcctcacctc

SEQ ID NO: 973 - RNA, 20 nt, synthetic construct
  source 1..20: mol_type = other RNA
cccagccctgctcgtggtga

SEQ ID NO: 974 - RNA, 20 nt, synthetic construct
  source 1..20: mol_type = other RNA
ccccaaggcgcagatcaaag

SEQ ID NO: 975 - RNA, 20 nt, synthetic construct
  source 1..20: mol_type = other RNA
ccccacagaggtaggtgccg

SEQ ID NO: 976 - RNA, 20 nt, synthetic construct
  source 1..20: mol_type = other RNA
ccccaccttctccccagccc

SEQ ID NO: 977 - RNA, 20 nt, synthetic construct
  source 1..20: mol_type = other RNA
ccccagacaggccctggaac

SEQ ID NO: 978 - RNA, 20 nt, synthetic construct
  source 1..20: mol_type = other RNA
ccccagcaaccagacggaca

SEQ ID NO: 979 - RNA, 20 nt, synthetic construct
  source 1..20: mol_type = other RNA
ccccagccctgctcgtggtg

SEQ ID NO: 980 - RNA, 20 nt, synthetic construct
  source 1..20: mol_type = other RNA
cccccaaggcgcagatcaaa

SEQ ID NO: 981 - RNA, 20 nt, synthetic construct
  source 1..20: mol_type = other RNA
cccccaccttctccccagcc

SEQ ID NO: 982 - RNA, 20 nt, synthetic construct
  source 1..20: mol_type = other RNA
ccccccaccttctccccagc

SEQ ID NO: 983 - RNA, 20 nt, synthetic construct
  source 1..20: mol_type = other RNA
ccccgaggaccgcagccagc

SEQ ID NO: 984 - RNA, 20 nt, synthetic construct
  source 1..20: mol_type = other RNA
ccccttcctcacctctctcc

SEQ ID NO: 985 - RNA, 20 nt, synthetic construct
  source 1..20: mol_type = other RNA
ccccttcggtcaccacgagc

SEQ ID NO: 986 - RNA, 20 nt, synthetic construct
  source 1..20: mol_type = other RNA
cccgaggaccgcagccagcc

SEQ ID NO: 987 - RNA, 20 nt, synthetic construct
  source 1..20: mol_type = other RNA
cccgcaggctctctttgatc

SEQ ID NO: 988 - RNA, 20 nt, synthetic construct
  source 1..20: mol_type = other RNA
cccggccaggactgccgctt

SEQ ID NO: 989 - RNA, 20 nt, synthetic construct
  source 1..20: mol_type = other RNA
cccggcgcaatgacagcggc

SEQ ID NO: 990 - RNA, 20 nt, synthetic construct
  source 1..20: mol_type = other RNA
cccgttgggcagttgtgtga

SEQ ID NO: 991 - RNA, 20 nt, synthetic construct
  source 1..20: mol_type = other RNA
ccctgaccacgctcatgtgg

SEQ ID NO: 992 - RNA, 20 nt, synthetic construct
  source 1..20: mol_type = other RNA
ccctgagctctgcccgcagg

SEQ ID NO: 993 - RNA, 20 nt, synthetic construct
  source 1..20: mol_type = other RNA
ccctgctcgtggtgaccgaa

SEQ ID NO: 994 - RNA, 20 nt, synthetic construct
  source 1..20: mol_type = other RNA
ccctggcccccaaggcgcag

SEQ ID NO: 995 - RNA, 20 nt, synthetic construct
  source 1..20: mol_type = other RNA
cccttcctcacctctctcca

SEQ ID NO: 996 - RNA, 20 nt, synthetic construct
  source 1..20: mol_type = other RNA
cccttcggtcaccacgagca

SEQ ID NO: 997 - RNA, 20 nt, synthetic construct
  source 1..20: mol_type = other RNA
ccgaaggggacaacgccacc

SEQ ID NO: 998 - RNA, 20 nt, synthetic construct
  source 1..20: mol_type = other RNA
ccgaggaccgcagccagccc

SEQ ID NO: 999 - RNA, 20 nt, synthetic construct
  source 1..20: mol_type = other RNA
ccgaggccgcacctgtcacc

SEQ ID NO: 1000 - RNA, 20 nt, synthetic construct
  source 1..20: mol_type = other RNA
ccgatgtgttggagaagctg

SEQ ID NO: 1001 - RNA, 20 nt, synthetic construct
  source 1..20: mol_type = other RNA
ccgcacctgtcaccctgagc

SEQ ID NO: 1002 - RNA, 20 nt, synthetic construct
  source 1..20: mol_type = other RNA
ccgcaggctctctttgatct

SEQ ID NO: 1003 - RNA, 20 nt, synthetic construct
  source 1..20: mol_type = other RNA
ccgcatgagccccagcaacc

SEQ ID NO: 1004 - RNA, 20 nt, synthetic construct
  source 1..20: mol_type = other RNA
ccgccttccccgaggaccgc

SEQ ID NO: 1005 - RNA, 20 nt, synthetic construct
  source 1..20: mol_type = other RNA
ccgctgtcattgcgccgggc

SEQ ID NO: 1006 - RNA, 20 nt, synthetic construct
  source 1..20: mol_type = other RNA
ccgcttccgtgtcacacaac

SEQ ID NO: 1007 - RNA, 20 nt, synthetic construct
  source 1..20: mol_type = other RNA
ccggccaggactgccgcttc

SEQ ID NO: 1008 - RNA, 20 nt, synthetic construct
  source 1..20: mol_type = other RNA
ccggcgcaatgacagcggca

SEQ ID NO: 1009 - RNA, 20 nt, synthetic construct
  source 1..20: mol_type = other RNA
ccgggccctgaccacgctca

SEQ ID NO: 1010 - RNA, 20 nt, synthetic construct
  source 1..20: mol_type = other RNA
ccgggctggctgcggtcctc

SEQ ID NO: 1011 - RNA, 20 nt, synthetic construct
  source 1..20: mol_type = other RNA
ccgtctggttgctggggctc

SEQ ID NO: 1012 - RNA, 20 nt, synthetic construct
  source 1..20: mol_type = other RNA
ccgtgtcacacaactgccca

SEQ ID NO: 1013 - RNA, 20 nt, synthetic construct
  source 1..20: mol_type = other RNA
ccgttgggcagttgtgtgac

SEQ ID NO: 1014 - RNA, 20 nt, synthetic construct
  source 1..20: mol_type = other RNA
cctacctctgtggggccatc

SEQ ID NO: 1015 - RNA, 20 nt, synthetic construct
  source 1..20: mol_type = other RNA
cctcacctctctccatctct

SEQ ID NO: 1016 - RNA, 20 nt, synthetic construct
  source 1..20: mol_type = other RNA
cctccgaggccgcacctgtc

SEQ ID NO: 1017 - RNA, 20 nt, synthetic construct
  source 1..20: mol_type = other RNA
cctcggggaaggcggccagc

SEQ ID NO: 1018 - RNA, 20 nt, synthetic construct
  source 1..20: mol_type = other RNA
cctctctccatctctcagac

SEQ ID NO: 1019 - RNA, 20 nt, synthetic construct
  source 1..20: mol_type = other RNA
cctctgtggggccatctccc

SEQ ID NO: 1020 - RNA, 20 nt, synthetic construct
  source 1..20: mol_type = other RNA
cctgaccacgctcatgtgga

SEQ ID NO: 1021 - RNA, 20 nt, synthetic construct
  source 1..20: mol_type = other RNA
cctgagctctgcccgcaggc

SEQ ID NO: 1022 - RNA, 20 nt, synthetic construct
  source 1..20: mol_type = other RNA
cctgcagcttctccaacaca

SEQ ID NO: 1023 - RNA, 20 nt, synthetic construct
  source 1..20: mol_type = other RNA
cctgcgggcagagctcaggg

SEQ ID NO: 1024 - RNA, 20 nt, synthetic construct
  source 1..20: mol_type = other RNA
cctgctcgtggtgaccgaag

SEQ ID NO: 1025 - RNA, 20 nt, synthetic construct
  source 1..20: mol_type = other RNA
cctggcccccaaggcgcaga

SEQ ID NO: 1026 - RNA, 20 nt, synthetic construct
  source 1..20: mol_type = other RNA
cctgtcaccctgagctctgc

SEQ ID NO: 1027 - RNA, 20 nt, synthetic construct
  source 1..20: mol_type = other RNA
cctgtctggggagtctgaga

SEQ ID NO: 1028 - RNA, 20 nt, synthetic construct
  source 1..20: mol_type = other RNA
ccttcacctgcagcttctcc

SEQ ID NO: 1029 - RNA, 20 nt, synthetic construct
  source 1..20: mol_type = other RNA
ccttccccgaggaccgcagc

SEQ ID NO: 1030 - RNA, 20 nt, synthetic construct
  source 1..20: mol_type = other RNA
ccttcctcacctctctccat

SEQ ID NO: 1031 - RNA, 20 nt, synthetic construct
  source 1..20: mol_type = other RNA
ccttcggtcaccacgagcag

SEQ ID NO: 1032 - RNA, 20 nt, synthetic construct
  source 1..20: mol_type = other RNA
ccttctccccagccctgctc

SEQ ID NO: 1033 - RNA, 20 nt, synthetic construct
  source 1..20: mol_type = other RNA
ccttgggggccagggagatg

SEQ ID NO: 1034 - RNA, 20 nt, synthetic construct
  source 1..20: mol_type = other RNA
cgaagctctccgatgtgttg

SEQ ID NO: 1035 - RNA, 20 nt, synthetic construct
  source 1..20: mol_type = other RNA
cgaaggggacaacgccacct

SEQ ID NO: 1036 - RNA, 20 nt, synthetic construct
  source 1..20: mol_type = other RNA
cgagcagggctggggagaag

SEQ ID NO: 1037 - RNA, 20 nt, synthetic construct
  source 1..20: mol_type = other RNA
cgaggaccgcagccagcccg

SEQ ID NO: 1038 - RNA, 20 nt, synthetic construct
  source 1..20: mol_type = other RNA
cgaggccgcacctgtcaccc

SEQ ID NO: 1039 - RNA, 20 nt, synthetic construct
  source 1..20: mol_type = other RNA
cgatgtgttggagaagctgc

SEQ ID NO: 1040 - RNA, 20 nt, synthetic construct
  source 1..20: mol_type = other RNA
cgcaatgacagcggcaccta

SEQ ID NO: 1041 - RNA, 20 nt, synthetic construct
  source 1..20: mol_type = other RNA
cgcacctgtcaccctgagct

SEQ ID NO: 1042 - RNA, 20 nt, synthetic construct
  source 1..20: mol_type = other RNA
cgcagatcaaagagagcctg

SEQ ID NO: 1043 - RNA, 20 nt, synthetic construct
  source 1..20: mol_type = other RNA
cgcagccagcccggccagga

SEQ ID NO: 1044 - RNA, 20 nt, synthetic construct
  source 1..20: mol_type = other RNA
cgcaggctctctttgatctg

SEQ ID NO: 1045 - RNA, 20 nt, synthetic construct
  source 1..20: mol_type = other RNA
cgcatgagccccagcaacca

SEQ ID NO: 1046 - RNA, 20 nt, synthetic construct
  source 1..20: mol_type = other RNA
cgccaccttcacctgcagct

SEQ ID NO: 1047 - RNA, 20 nt, synthetic construct
  source 1..20: mol_type = other RNA
cgcccgttgggcagttgtgt

SEQ ID NO: 1048 - RNA, 20 nt, synthetic construct
  source 1..20: mol_type = other RNA
cgccgggccctgaccacgct

SEQ ID NO: 1049 - RNA, 20 nt, synthetic construct
  source 1..20: mol_type = other RNA
cgccttccccgaggaccgca

SEQ ID NO: 1050 - RNA, 20 nt, synthetic construct
  source 1..20: mol_type = other RNA
cgccttgggggccagggaga

SEQ ID NO: 1051 - RNA, 20 nt, synthetic construct
  source 1..20: mol_type = other RNA
cgctcatgtggaagtcacgc

SEQ ID NO: 1052 - RNA, 20 nt, synthetic construct
  source 1..20: mol_type = other RNA
cgctgtcattgcgccgggcc

SEQ ID NO: 1053 - RNA, 20 nt, synthetic construct
  source 1..20: mol_type = other RNA
cgcttccgtgtcacacaact

SEQ ID NO: 1054 - RNA, 20 nt, synthetic construct
  source 1..20: mol_type = other RNA
cggaagcggcagtcctggcc

SEQ ID NO: 1055 - RNA, 20 nt, synthetic construct
  source 1..20: mol_type = other RNA
cggacaagctggccgccttc

SEQ ID NO: 1056 - RNA, 20 nt, synthetic construct
  source 1..20: mol_type = other RNA
cggagagcttcgtgctaaac

SEQ ID NO: 1057 - RNA, 20 nt, synthetic construct
  source 1..20: mol_type = other RNA
cggcacctacctctgtgggg

SEQ ID NO: 1058 - RNA, 20 nt, synthetic construct
  source 1..20: mol_type = other RNA
cggcagtcctggccgggctg

SEQ ID NO: 1059 - RNA, 20 nt, synthetic construct
  source 1..20: mol_type = other RNA
cggccagcttgtccgtctgg

SEQ ID NO: 1060 - RNA, 20 nt, synthetic construct
  source 1..20: mol_type = other RNA
cggccaggactgccgcttcc

SEQ ID NO: 1061 - RNA, 20 nt, synthetic construct
  source 1..20: mol_type = other RNA
cggcgcaatgacagcggcac

SEQ ID NO: 1062 - RNA, 20 nt, synthetic construct
  source 1..20: mol_type = other RNA
cgggcagagctcagggtgac

SEQ ID NO: 1063 - RNA, 20 nt, synthetic construct
  source 1..20: mol_type = other RNA
cgggccctgaccacgctcat

SEQ ID NO: 1064 - RNA, 20 nt, synthetic construct
  source 1..20: mol_type = other RNA
cgggcgtgacttccacatga

SEQ ID NO: 1065 - RNA, 20 nt, synthetic construct
  source 1..20: mol_type = other RNA
cgggctggctgcggtcctcg

SEQ ID NO: 1066 - RNA, 20 nt, synthetic construct
  source 1..20: mol_type = other RNA
cggggaaggcggccagcttg

SEQ ID NO: 1067 - RNA, 20 nt, synthetic construct
  source 1..20: mol_type = other RNA
cggtaccagtttagcacgaa

SEQ ID NO: 1068 - RNA, 20 nt, synthetic construct
  source 1..20: mol_type = other RNA
cggtcaccacgagcagggct

SEQ ID NO: 1069 - RNA, 20 nt, synthetic construct
  source 1..20: mol_type = other RNA
cggtcctcggggaaggcggc

SEQ ID NO: 1070 - RNA, 20 nt, synthetic construct
  source 1..20: mol_type = other RNA
cgtctggttgctggggctca

SEQ ID NO: 1071 - RNA, 20 nt, synthetic construct
  source 1..20: mol_type = other RNA
cgtgacttccacatgagcgt

SEQ ID NO: 1072 - RNA, 20 nt, synthetic construct
  source 1..20: mol_type = other RNA
cgtgctaaactggtaccgca

SEQ ID NO: 1073 - RNA, 20 nt, synthetic construct
  source 1..20: mol_type = other RNA
cgtggtcagggcccggcgca

SEQ ID NO: 1074 - RNA, 20 nt, synthetic construct
  source 1..20: mol_type = other RNA
cgtggtgaccgaaggggaca

SEQ ID NO: 1075 - RNA, 20 nt, synthetic construct
  source 1..20: mol_type = other RNA
cgtgtcacacaactgcccaa

SEQ ID NO: 1076 - RNA, 20 nt, synthetic construct
  source 1..20: mol_type = other RNA
cgttgggcagttgtgtgaca

SEQ ID NO: 1077 - RNA, 20 nt, synthetic construct
  source 1..20: mol_type = other RNA
cgttgtccccttcggtcacc

SEQ ID NO: 1078 - RNA, 20 nt, synthetic construct
  source 1..20: mol_type = other RNA
ctaaactggtaccgcatgag

SEQ ID NO: 1079 - RNA, 20 nt, synthetic construct
  source 1..20: mol_type = other RNA
ctacctctgtggggccatct

SEQ ID NO: 1080 - RNA, 20 nt, synthetic construct
  source 1..20: mol_type = other RNA
ctcacctctctccatctctc

SEQ ID NO: 1081 - RNA, 20 nt, synthetic construct
  source 1..20: mol_type = other RNA
ctcagactccccagacaggc

SEQ ID NO: 1082 - RNA, 20 nt, synthetic construct
  source 1..20: mol_type = other RNA
ctcagctcacccctgccccg

SEQ ID NO: 1083 - RNA, 20 nt, synthetic construct
  source 1..20: mol_type = other RNA
ctcagggtgacaggtgcggc

SEQ ID NO: 1084 - RNA, 20 nt, synthetic construct
  source 1..20: mol_type = other RNA
ctcatgcggtaccagtttag

SEQ ID NO: 1085 - RNA, 20 nt, synthetic construct
  source 1..20: mol_type = other RNA
ctcatgtggaagtcacgccc

SEQ ID NO: 1086 - RNA, 20 nt, synthetic construct
  source 1..20: mol_type = other RNA
ctccaacacatcggagagct

SEQ ID NO: 1087 - RNA, 20 nt, synthetic construct
  source 1..20: mol_type = other RNA
ctccatctctcagactcccc

SEQ ID NO: 1088 - RNA, 20 nt, synthetic construct
  source 1..20: mol_type = other RNA
ctccccagacaggccctgga

SEQ ID NO: 1089 - RNA, 20 nt, synthetic construct
  source 1..20: mol_type = other RNA
ctccccagccctgctcgtgg

SEQ ID NO: 1090 - RNA, 20 nt, synthetic construct
  source 1..20: mol_type = other RNA
ctccctggcccccaaggcgc

SEQ ID NO: 1091 - RNA, 20 nt, synthetic construct
  source 1..20: mol_type = other RNA
ctccgaggccgcacctgtca

SEQ ID NO: 1092 - RNA, 20 nt, synthetic construct
  source 1..20: mol_type = other RNA
ctccgatgtgttggagaagc

SEQ ID NO: 1093 - RNA, 20 nt, synthetic construct
  source 1..20: mol_type = other RNA
ctcggggaaggcggccagct

SEQ ID NO: 1094 - RNA, 20 nt, synthetic construct
  source 1..20: mol_type = other RNA
ctcgtggtgaccgaagggga

SEQ ID NO: 1095 - RNA, 20 nt, synthetic construct
  source 1..20: mol_type = other RNA
ctctcagactccccagacag

SEQ ID NO: 1096 - RNA, 20 nt, synthetic construct
  source 1..20: mol_type = other RNA
ctctccatctctcagactcc

SEQ ID NO: 1097 - RNA, 20 nt, synthetic construct
  source 1..20: mol_type = other RNA
ctctccgatgtgttggagaa

SEQ ID NO: 1098 - RNA, 20 nt, synthetic construct
  source 1..20: mol_type = other RNA
ctctctccatctctcagact

SEQ ID NO: 1099 - RNA, 20 nt, synthetic construct
  source 1..20: mol_type = other RNA
ctctctttgatctgcgcctt

SEQ ID NO: 1100 - RNA, 20 nt, synthetic construct
  source 1..20: mol_type = other RNA
ctctgcccgcaggctctctt

SEQ ID NO: 1101 - RNA, 20 nt, synthetic construct
  source 1..20: mol_type = other RNA
ctctgtggggccatctccct

SEQ ID NO: 1102 - RNA, 20 nt, synthetic construct
  source 1..20: mol_type = other RNA
ctctttgatctgcgccttgg

SEQ ID NO: 1103 - RNA, 20 nt, synthetic construct
  source 1..20: mol_type = other RNA
ctgaccacgctcatgtggaa

SEQ ID NO: 1104 - RNA, 20 nt, synthetic construct
  source 1..20: mol_type = other RNA
ctgagagatggagagaggtg

SEQ ID NO: 1105 - RNA, 20 nt, synthetic construct
  source 1..20: mol_type = other RNA
ctgagctctgcccgcaggct

SEQ ID NO: 1106 - RNA, 20 nt, synthetic construct
  source 1..20: mol_type = other RNA
ctgcagcttctccaacacat

SEQ ID NO: 1107 - RNA, 20 nt, synthetic construct
  source 1..20: mol_type = other RNA
ctgcaggtgaaggtggcgtt

SEQ ID NO: 1108 - RNA, 20 nt, synthetic construct
  source 1..20: mol_type = other RNA
ctgcccaacgggcgtgactt

SEQ ID NO: 1109 - RNA, 20 nt, synthetic construct
  source 1..20: mol_type = other RNA
ctgcccgcaggctctctttg

SEQ ID NO: 1110 - RNA, 20 nt, synthetic construct
  source 1..20: mol_type = other RNA
ctgccgcttccgtgtcacac

SEQ ID NO: 1111 - RNA, 20 nt, synthetic construct
  source 1..20: mol_type = other RNA
ctgcgccttgggggccaggg

SEQ ID NO: 1112 - RNA, 20 nt, synthetic construct
  source 1..20: mol_type = other RNA
ctgcgggcagagctcagggt

SEQ ID NO: 1113 - RNA, 20 nt, synthetic construct
  source 1..20: mol_type = other RNA
ctgcggtcctcggggaaggc

SEQ ID NO: 1114 - RNA, 20 nt, synthetic construct
  source 1..20: mol_type = other RNA
ctgctcgtggtgaccgaagg

SEQ ID NO: 1115 - RNA, 20 nt, synthetic construct
  source 1..20: mol_type = other RNA
ctggcccccaaggcgcagat

SEQ ID NO: 1116 - RNA, 20 nt, synthetic construct
  source 1..20: mol_type = other RNA
ctggccgccttccccgagga

SEQ ID NO: 1117 - RNA, 20 nt, synthetic construct
  source 1..20: mol_type = other RNA
ctggccgggctggctgcggt

SEQ ID NO: 1118 - RNA, 20 nt, synthetic construct
  source 1..20: mol_type = other RNA
ctggctgcggtcctcgggga

SEQ ID NO: 1119 - RNA, 20 nt, synthetic construct
  source 1..20: mol_type = other RNA
ctggggagtctgagagatgg

SEQ ID NO: 1120 - RNA, 20 nt, synthetic construct
  source 1..20: mol_type = other RNA
ctggggctcatgcggtacca

SEQ ID NO: 1121 - RNA, 20 nt, synthetic construct
  source 1..20: mol_type = other RNA
ctggtaccgcatgagcccca

SEQ ID NO: 1122 - RNA, 20 nt, synthetic construct
  source 1..20: mol_type = other RNA
ctggttgctggggctcatgc

SEQ ID NO: 1123 - RNA, 20 nt, synthetic construct
  source 1..20: mol_type = other RNA
ctgtcaccctgagctctgcc

SEQ ID NO: 1124 - RNA, 20 nt, synthetic construct
  source 1..20: mol_type = other RNA
ctgtcattgcgccgggccct

SEQ ID NO: 1125 - RNA, 20 nt, synthetic construct
  source 1..20: mol_type = other RNA
ctgtctggggagtctgagag

SEQ ID NO: 1126 - RNA, 20 nt, synthetic construct
  source 1..20: mol_type = other RNA
ctgtggggccatctccctgg

SEQ ID NO: 1127 - RNA, 20 nt, synthetic construct
  source 1..20: mol_type = other RNA
cttcacctgcagcttctcca

SEQ ID NO: 1128 - RNA, 20 nt, synthetic construct
  source 1..20: mol_type = other RNA
cttccacatgagcgtggtca

SEQ ID NO: 1129 - RNA, 20 nt, synthetic construct
  source 1..20: mol_type = other RNA
cttccccgaggaccgcagcc

SEQ ID NO: 1130 - RNA, 20 nt, synthetic construct
  source 1..20: mol_type = other RNA
cttccgtgtcacacaactgc

SEQ ID NO: 1131 - RNA, 20 nt, synthetic construct
  source 1..20: mol_type = other RNA
cttcctcacctctctccatc

SEQ ID NO: 1132 - RNA, 20 nt, synthetic construct
  source 1..20: mol_type = other RNA
cttcggtcaccacgagcagg

SEQ ID NO: 1133 - RNA, 20 nt, synthetic construct
  source 1..20: mol_type = other RNA
cttcgtgctaaactggtacc

SEQ ID NO: 1134 - RNA, 20 nt, synthetic construct
  source 1..20: mol_type = other RNA
cttctccaacacatcggaga

SEQ ID NO: 1135 - RNA, 20 nt, synthetic construct
  source 1..20: mol_type = other RNA
cttctccccagccctgctcg

SEQ ID NO: 1136 - RNA, 20 nt, synthetic construct
  source 1..20: mol_type = other RNA
cttgggggccagggagatgg

SEQ ID NO: 1137 - RNA, 20 nt, synthetic construct
  source 1..20: mol_type = other RNA
cttgtccgtctggttgctgg

SEQ ID NO: 1138 - RNA, 20 nt, synthetic construct
  source 1..20: mol_type = other RNA
ctttgatctgcgccttgggg

SEQ ID NO: 1139 - RNA, 20 nt, synthetic construct
  source 1..20: mol_type = other RNA
gaagcggcagtcctggccgg

SEQ ID NO: 1140 - RNA, 20 nt, synthetic construct
  source 1..20: mol_type = other RNA
gaagctctccgatgtgttgg

SEQ ID NO: 1141 - RNA, 20 nt, synthetic construct
  source 1..20: mol_type = other RNA
gaagctgcaggtgaaggtgg

SEQ ID NO: 1142 - RNA, 20 nt, synthetic construct
  source 1..20: mol_type = other RNA
gaaggcggccagcttgtccg

SEQ ID NO: 1143 - RNA, 20 nt, synthetic construct
  source 1..20: mol_type = other RNA
gaaggggacaacgccacctt

SEQ ID NO: 1144 - RNA, 20 nt, synthetic construct
  source 1..20: mol_type = other RNA
gaaggtggcgttgtcccctt

SEQ ID NO: 1145 - RNA, 20 nt, synthetic construct
  source 1..20: mol_type = other RNA
gaagtcacgcccgttgggca

SEQ ID NO: 1146 - RNA, 20 nt, synthetic construct
  source 1..20: mol_type = other RNA
gacaacgccaccttcacctg

SEQ ID NO: 1147 - RNA, 20 nt, synthetic construct
  source 1..20: mol_type = other RNA
gacaagctggccgccttccc

SEQ ID NO: 1148 - RNA, 20 nt, synthetic construct
  source 1..20: mol_type = other RNA
gacacggaagcggcagtcct

SEQ ID NO: 1149 - RNA, 20 nt, synthetic construct
  source 1..20: mol_type = other RNA
gacagcggcacctacctctg

SEQ ID NO: 1150 - RNA, 20 nt, synthetic construct
  source 1..20: mol_type = other RNA
gacaggccctggaacccccc

SEQ ID NO: 1151 - RNA, 20 nt, synthetic construct
  source 1..20: mol_type = other RNA
gacaggtgcggcctcggagg

SEQ ID NO: 1152 - RNA, 20 nt, synthetic construct
  source 1..20: mol_type = other RNA
gaccacgctcatgtggaagt

SEQ ID NO: 1153 - RNA, 20 nt, synthetic construct
  source 1..20: mol_type = other RNA
gaccgaaggggacaacgcca

SEQ ID NO: 1154 - RNA, 20 nt, synthetic construct
  source 1..20: mol_type = other RNA
gaccgcagccagcccggcca

SEQ ID NO: 1155 - RNA, 20 nt, synthetic construct
  source 1..20: mol_type = other RNA
gacggacaagctggccgcct

SEQ ID NO: 1156 - RNA, 20 nt, synthetic construct
  source 1..20: mol_type = other RNA
gactccccagacaggccctg

SEQ ID NO: 1157 - RNA, 20 nt, synthetic construct
  source 1..20: mol_type = other RNA
gactgccgcttccgtgtcac

SEQ ID NO: 1158 - RNA, 20 nt, synthetic construct
  source 1..20: mol_type = other RNA
gacttccacatgagcgtggt

SEQ ID NO: 1159 - RNA, 20 nt, synthetic construct
  source 1..20: mol_type = other RNA
gagaagctgcaggtgaaggt

SEQ ID NO: 1160 - RNA, 20 nt, synthetic construct
  source 1..20: mol_type = other RNA
gagagaggtgaggaaggggc

SEQ ID NO: 1161 - RNA, 20 nt, synthetic construct
  source 1..20: mol_type = other RNA
gagagatggagagaggtgag

SEQ ID NO: 1162 - RNA, 20 nt, synthetic construct
  source 1..20: mol_type = other RNA
gagagcctgcgggcagagct

SEQ ID NO: 1163 - RNA, 20 nt, synthetic construct
  source 1..20: mol_type = other RNA
gagagcttcgtgctaaactg

SEQ ID NO: 1164 - RNA, 20 nt, synthetic construct
  source 1..20: mol_type = other RNA
gagatggagagaggtgagga

SEQ ID NO: 1165 - RNA, 20 nt, synthetic construct
  source 1..20: mol_type = other RNA
gagatggccccacagaggta

SEQ ID NO: 1166 - RNA, 20 nt, synthetic construct
  source 1..20: mol_type = other RNA
gagcagggctggggagaagg

SEQ ID NO: 1167 - RNA, 20 nt, synthetic construct
  source 1..20: mol_type = other RNA
gagccccagcaaccagacgg

SEQ ID NO: 1168 - RNA, 20 nt, synthetic construct
  source 1..20: mol_type = other RNA
gagcctgcgggcagagctca

SEQ ID NO: 1169 - RNA, 20 nt, synthetic construct
  source 1..20: mol_type = other RNA
gagcgtggtcagggcccggc

SEQ ID NO: 1170 - RNA, 20 nt, synthetic construct
  source 1..20: mol_type = other RNA
gagctcagggtgacaggtgc

SEQ ID NO: 1171 - RNA, 20 nt, synthetic construct
  source 1..20: mol_type = other RNA
gagctctgcccgcaggctct

SEQ ID NO: 1172 - RNA, 20 nt, synthetic construct
  source 1..20: mol_type = other RNA
gagcttcgtgctaaactggt

SEQ ID NO: 1173 - RNA, 20 nt, synthetic construct
  source 1..20: mol_type = other RNA
gaggaccgcagccagcccgg

SEQ ID NO: 1174 - RNA, 20 nt, synthetic construct
  source 1..20: mol_type = other RNA
gaggccgcacctgtcaccct

SEQ ID NO: 1175 - RNA, 20 nt, synthetic construct
  source 1..20: mol_type = other RNA
gaggtaggtgccgctgtcat

SEQ ID NO: 1176 - RNA, 20 nt, synthetic construct
  source 1..20: mol_type = other RNA
gagtctgagagatggagaga

SEQ ID NO: 1177 - RNA, 20 nt, synthetic construct
  source 1..20: mol_type = other RNA
gatcaaagagagcctgcggg

SEQ ID NO: 1178 - RNA, 20 nt, synthetic construct
  source 1..20: mol_type = other RNA
gatctgcgccttgggggcca

SEQ ID NO: 1179 - RNA, 20 nt, synthetic construct
  source 1..20: mol_type = other RNA
gatggagagaggtgaggaag

SEQ ID NO: 1180 - RNA, 20 nt, synthetic construct
  source 1..20: mol_type = other RNA
gatggccccacagaggtagg

SEQ ID NO: 1181 - RNA, 20 nt, synthetic construct
  source 1..20: mol_type = other RNA
gatgtgttggagaagctgca

SEQ ID NO: 1182 - RNA, 20 nt, synthetic construct
  source 1..20: mol_type = other RNA
gcaaccagacggacaagctg

SEQ ID NO: 1183 - RNA, 20 nt, synthetic construct
  source 1..20: mol_type = other RNA
gcaatgacagcggcacctac

SEQ ID NO: 1184 - RNA, 20 nt, synthetic construct
  source 1..20: mol_type = other RNA
gcacctacctctgtggggcc

SEQ ID NO: 1185 - RNA, 20 nt, synthetic construct
  source 1..20: mol_type = other RNA
gcacctgtcaccctgagctc

SEQ ID NO: 1186 - RNA, 20 nt, synthetic construct
  source 1..20: mol_type = other RNA
gcacgaagctctccgatgtg

SEQ ID NO: 1187 - RNA, 20 nt, synthetic construct
  source 1..20: mol_type = other RNA
gcagagctcagggtgacagg

SEQ ID NO: 1188 - RNA, 20 nt, synthetic construct
  source 1..20: mol_type = other RNA
gcagatcaaagagagcctgc

SEQ ID NO: 1189 - RNA, 20 nt, synthetic construct
  source 1..20: mol_type = other RNA
gcagccagcccggccaggac

SEQ ID NO: 1190 - RNA, 20 nt, synthetic construct
  source 1..20: mol_type = other RNA
gcagcttctccaacacatcg

SEQ ID NO: 1191 - RNA, 20 nt, synthetic construct
  source 1..20: mol_type = other RNA
gcaggctctctttgatctgc

SEQ ID NO: 1192 - RNA, 20 nt, synthetic construct
  source 1..20: mol_type = other RNA
gcagggctggggagaaggtg

SEQ ID NO: 1193 - RNA, 20 nt, synthetic construct
  source 1..20: mol_type = other RNA
gcaggtgaaggtggcgttgt

SEQ ID NO: 1194 - RNA, 20 nt, synthetic construct
  source 1..20: mol_type = other RNA
gcagtcctggccgggctggc

SEQ ID NO: 1195 - RNA, 20 nt, synthetic construct
  source 1..20: mol_type = other RNA
gcagttgtgtgacacggaag

SEQ ID NO: 1196 - RNA, 20 nt, synthetic construct
  source 1..20: mol_type = other RNA
gcatgagccccagcaaccag

SEQ ID NO: 1197 - RNA, 20 nt, synthetic construct
  source 1..20: mol_type = other RNA
gccacccagccccttcctca

SEQ ID NO: 1198 - RNA, 20 nt, synthetic construct
  source 1..20: mol_type = other RNA
gccaccttcacctgcagctt

SEQ ID NO: 1199 - RNA, 20 nt, synthetic construct
  source 1..20: mol_type = other RNA
gccagcccggccaggactgc

SEQ ID NO: 1200 - RNA, 20 nt, synthetic construct
  source 1..20: mol_type = other RNA
gccagcttgtccgtctggtt

SEQ ID NO: 1201 - RNA, 20 nt, synthetic construct
  source 1..20: mol_type = other RNA
gccaggactgccgcttccgt

SEQ ID NO: 1202 - RNA, 20 nt, synthetic construct
  source 1..20: mol_type = other RNA
gccagggagatggccccaca

SEQ ID NO: 1203 - RNA, 20 nt, synthetic construct
  source 1..20: mol_type = other RNA
gccatctccctggcccccaa

SEQ ID NO: 1204 - RNA, 20 nt, synthetic construct
  source 1..20: mol_type = other RNA
gcccaacgggcgtgacttcc

SEQ ID NO: 1205 - RNA, 20 nt, synthetic construct
  source 1..20: mol_type = other RNA
gccccacagaggtaggtgcc

SEQ ID NO: 1206 - RNA, 20 nt, synthetic construct
  source 1..20: mol_type = other RNA
gccccagcaaccagacggac

SEQ ID NO: 1207 - RNA, 20 nt, synthetic construct
  source 1..20: mol_type = other RNA
gcccccaaggcgcagatcaa

SEQ ID NO: 1208 - RNA, 20 nt, synthetic construct
  source 1..20: mol_type = other RNA
gccccttcctcacctctctc

SEQ ID NO: 1209 - RNA, 20 nt, synthetic construct
  source 1..20: mol_type = other RNA
gcccgcaggctctctttgat

SEQ ID NO: 1210 - RNA, 20 nt, synthetic construct
  source 1..20: mol_type = other RNA
gcccggccaggactgccgct

SEQ ID NO: 1211 - RNA, 20 nt, synthetic construct
  source 1..20: mol_type = other RNA
gcccggcgcaatgacagcgg

SEQ ID NO: 1212 - RNA, 20 nt, synthetic construct
  source 1..20: mol_type = other RNA
gcccgttgggcagttgtgtg

SEQ ID NO: 1213 - RNA, 20 nt, synthetic construct
  source 1..20: mol_type = other RNA
gccctgaccacgctcatgtg

SEQ ID NO: 1214 - RNA, 20 nt, synthetic construct
  source 1..20: mol_type = other RNA
gccctgctcgtggtgaccga

SEQ ID NO: 1215 - RNA, 20 nt, synthetic construct
  source 1..20: mol_type = other RNA
gccgcacctgtcaccctgag

SEQ ID NO: 1216 - RNA, 20 nt, synthetic construct
  source 1..20: mol_type = other RNA
gccgccttccccgaggaccg

SEQ ID NO: 1217 - RNA, 20 nt, synthetic construct
  source 1..20: mol_type = other RNA
gccgctgtcattgcgccggg

SEQ ID NO: 1218 - RNA, 20 nt, synthetic construct
  source 1..20: mol_type = other RNA
gccgcttccgtgtcacacaa

SEQ ID NO: 1219 - RNA, 20 nt, synthetic construct
  source 1..20: mol_type = other RNA
gccgggccctgaccacgctc

SEQ ID NO: 1220 - RNA, 20 nt, synthetic construct
  source 1..20: mol_type = other RNA
gccgggctggctgcggtcct

SEQ ID NO: 1221 - RNA, 20 nt, synthetic construct
  source 1..20: mol_type = other RNA
gcctccgaggccgcacctgt

SEQ ID NO: 1222 - RNA, 20 nt, synthetic construct
  source 1..20: mol_type = other RNA
gcctgcgggcagagctcagg

SEQ ID NO: 1223 - RNA, 20 nt, synthetic construct
  source 1..20: mol_type = other RNA
gcctgtctggggagtctgag

SEQ ID NO: 1224 - RNA, 20 nt, synthetic construct
  source 1..20: mol_type = other RNA
gccttccccgaggaccgcag

SEQ ID NO: 1225 - RNA, 20 nt, synthetic construct
  source 1..20: mol_type = other RNA
gccttgggggccagggagat

SEQ ID NO: 1226 - RNA, 20 nt, synthetic construct
  source 1..20: mol_type = other RNA
gcgcaatgacagcggcacct

SEQ ID NO: 1227 - RNA, 20 nt, synthetic construct
  source 1..20: mol_type = other RNA
gcgcagatcaaagagagcct

SEQ ID NO: 1228 - RNA, 20 nt, synthetic construct
  source 1..20: mol_type = other RNA
gcgccttgggggccagggag

SEQ ID NO: 1229 - RNA, 20 nt, synthetic construct
  source 1..20: mol_type = other RNA
gcggcacctacctctgtggg

SEQ ID NO: 1230 - RNA, 20 nt, synthetic construct
  source 1..20: mol_type = other RNA
gcggcagtcctggccgggct

SEQ ID NO: 1231 - RNA, 20 nt, synthetic construct
  source 1..20: mol_type = other RNA
gcggccagcttgtccgtctg

SEQ ID NO: 1232 - RNA, 20 nt, synthetic construct
  source 1..20: mol_type = other RNA
gcgggcagagctcagggtga

SEQ ID NO: 1233 - RNA, 20 nt, synthetic construct
  source 1..20: mol_type = other RNA
gcggtaccagtttagcacga

SEQ ID NO: 1234 - RNA, 20 nt, synthetic construct
  source 1..20: mol_type = other RNA
gcggtcctcggggaaggcgg

SEQ ID NO: 1235 - RNA, 20 nt, synthetic construct
  source 1..20: mol_type = other RNA
gcgtgacttccacatgagcg

SEQ ID NO: 1236 - RNA, 20 nt, synthetic construct
  source 1..20: mol_type = other RNA
gcgttgtccccttcggtcac

SEQ ID NO: 1237 - RNA, 20 nt, synthetic construct
  source 1..20: mol_type = other RNA
gctaaactggtaccgcatga

SEQ ID NO: 1238 - RNA, 20 nt, synthetic construct
  source 1..20: mol_type = other RNA
gctcagctcacccctgcccc

SEQ ID NO: 1239 - RNA, 20 nt, synthetic construct
  source 1..20: mol_type = other RNA
gctcagggtgacaggtgcgg

SEQ ID NO: 1240 - RNA, 20 nt, synthetic construct
  source 1..20: mol_type = other RNA
gctcatgcggtaccagttta

SEQ ID NO: 1241 - RNA, 20 nt, synthetic construct
  source 1..20: mol_type = other RNA
gctcatgtggaagtcacgcc

SEQ ID NO: 1242 - RNA, 20 nt, synthetic construct
  source 1..20: mol_type = other RNA
gctcgtggtgaccgaagggg

SEQ ID NO: 1243 - RNA, 20 nt, synthetic construct
  source 1..20: mol_type = other RNA
gctctccgatgtgttggaga

SEQ ID NO: 1244 - RNA, 20 nt, synthetic construct
  source 1..20: mol_type = other RNA
gctctctttgatctgcgcct

SEQ ID NO: 1245 - RNA, 20 nt, synthetic construct
  source 1..20: mol_type = other RNA
gctctgcccgcaggctctct

SEQ ID NO: 1246 - RNA, 20 nt, synthetic construct
  source 1..20: mol_type = other RNA
gctgcaggtgaaggtggcgt

SEQ ID NO: 1247 - RNA, 20 nt, synthetic construct
  source 1..20: mol_type = other RNA
gctgcggtcctcggggaagg

SEQ ID NO: 1248 - RNA, 20 nt, synthetic construct
  source 1..20: mol_type = other RNA
gctggccgccttccccgagg

SEQ ID NO: 1249 - RNA, 20 nt, synthetic construct
  source 1..20: mol_type = other RNA
gctggctgcggtcctcgggg

SEQ ID NO: 1250 - RNA, 20 nt, synthetic construct
  source 1..20: mol_type = other RNA
gctggggagaaggtgggggg

SEQ ID NO: 1251 - RNA, 20 nt, synthetic construct
  source 1..20: mol_type = other RNA
gctggggctcatgcggtacc

SEQ ID NO: 1252 - RNA, 20 nt, synthetic construct
  source 1..20: mol_type = other RNA
gctgtcattgcgccgggccc

SEQ ID NO: 1253 - RNA, 20 nt, synthetic construct
  source 1..20: mol_type = other RNA
gcttccgtgtcacacaactg

SEQ ID NO: 1254 - RNA, 20 nt, synthetic construct
  source 1..20: mol_type = other RNA
gcttcgtgctaaactggtac

SEQ ID NO: 1255 - RNA, 20 nt, synthetic construct
  source 1..20: mol_type = other RNA
gcttctccaacacatcggag

SEQ ID NO: 1256 - RNA, 20 nt, synthetic construct
  source 1..20: mol_type = other RNA
gcttgtccgtctggttgctg

SEQ ID NO: 1257 - RNA, 20 nt, synthetic construct
  source 1..20: mol_type = other RNA
ggaagcggcagtcctggccg

SEQ ID NO: 1258 - RNA, 20 nt, synthetic construct
  source 1..20: mol_type = other RNA
ggaaggcggccagcttgtcc

SEQ ID NO: 1259 - RNA, 20 nt, synthetic construct
  source 1..20: mol_type = other RNA
ggaagtcacgcccgttgggc

SEQ ID NO: 1260 - RNA, 20 nt, synthetic construct
  source 1..20: mol_type = other RNA
ggacaacgccaccttcacct

SEQ ID NO: 1261 - RNA, 20 nt, synthetic construct
  source 1..20: mol_type = other RNA
ggacaagctggccgccttcc

SEQ ID NO: 1262 - RNA, 20 nt, synthetic construct
  source 1..20: mol_type = other RNA
ggactgccgcttccgtgtca

SEQ ID NO: 1263 - RNA, 20 nt, synthetic construct
  source 1..20: mol_type = other RNA
ggagaagctgcaggtgaagg

SEQ ID NO: 1264 - RNA, 20 nt, synthetic construct
  source 1..20: mol_type = other RNA
ggagagaggtgaggaagggg

SEQ ID NO: 1265 - RNA, 20 nt, synthetic construct
  source 1..20: mol_type = other RNA
ggagagcttcgtgctaaact

SEQ ID NO: 1266 - RNA, 20 nt, synthetic construct
  source 1..20: mol_type = other RNA
ggagatggccccacagaggt

SEQ ID NO: 1267 - RNA, 20 nt, synthetic construct
  source 1..20: mol_type = other RNA
ggagtctgagagatggagag

SEQ ID NO: 1268 - RNA, 20 nt, synthetic construct
  source 1..20: mol_type = other RNA
ggcacctacctctgtggggc

SEQ ID NO: 1269 - RNA, 20 nt, synthetic construct
  source 1..20: mol_type = other RNA
ggcagagctcagggtgacag

SEQ ID NO: 1270 - RNA, 20 nt, synthetic construct
  source 1..20: mol_type = other RNA
ggcagtcctggccgggctgg

SEQ ID NO: 1271 - RNA, 20 nt, synthetic construct
  source 1..20: mol_type = other RNA
ggcagttgtgtgacacggaa

SEQ ID NO: 1272 - RNA, 20 nt, synthetic construct
  source 1..20: mol_type = other RNA
ggccagcttgtccgtctggt

SEQ ID NO: 1273 - RNA, 20 nt, synthetic construct
  source 1..20: mol_type = other RNA
ggccaggactgccgcttccg

SEQ ID NO: 1274 - RNA, 20 nt, synthetic construct
  source 1..20: mol_type = other RNA
ggccagggagatggccccac

SEQ ID NO: 1275 - RNA, 20 nt, synthetic construct
  source 1..20: mol_type = other RNA
ggccatctccctggccccca

SEQ ID NO: 1276 - RNA, 20 nt, synthetic construct
  source 1..20: mol_type = other RNA
ggccccacagaggtaggtgc

SEQ ID NO: 1277 - RNA, 20 nt, synthetic construct
  source 1..20: mol_type = other RNA
ggcccccaaggcgcagatca

SEQ ID NO: 1278 - RNA, 20 nt, synthetic construct
  source 1..20: mol_type = other RNA
ggcccggcgcaatgacagcg

SEQ ID NO: 1279 - RNA, 20 nt, synthetic construct
  source 1..20: mol_type = other RNA
ggccctgaccacgctcatgt

SEQ ID NO: 1280 - RNA, 20 nt, synthetic construct
  source 1..20: mol_type = other RNA
ggccgcacctgtcaccctga

SEQ ID NO: 1281 - RNA, 20 nt, synthetic construct
  source 1..20: mol_type = other RNA
ggccgccttccccgaggacc

SEQ ID NO: 1282 - RNA, 20 nt, synthetic construct
  source 1..20: mol_type = other RNA
ggcctccgaggccgcacctg

SEQ ID NO: 1283 - RNA, 20 nt, synthetic construct
  source 1..20: mol_type = other RNA
ggcctgtctggggagtctga

SEQ ID NO: 1284 - RNA, 20 nt, synthetic construct
  source 1..20: mol_type = other RNA
ggcgcaatgacagcggcacc

SEQ ID NO: 1285 - RNA, 20 nt, synthetic construct
  source 1..20: mol_type = other RNA
ggcgcagatcaaagagagcc

SEQ ID NO: 1286 - RNA, 20 nt, synthetic construct
  source 1..20: mol_type = other RNA
ggcggccagcttgtccgtct

SEQ ID NO: 1287 - RNA, 20 nt, synthetic construct
  source 1..20: mol_type = other RNA
ggcgtgacttccacatgagc

SEQ ID NO: 1288 - RNA, 20 nt, synthetic construct
  source 1..20: mol_type = other RNA
ggcgttgtccccttcggtca

SEQ ID NO: 1289 - RNA, 20 nt, synthetic construct
  source 1..20: mol_type = other RNA
ggctcatgcggtaccagttt

SEQ ID NO: 1290 - RNA, 20 nt, synthetic construct
  source 1..20: mol_type = other RNA
ggctctctttgatctgcgcc

SEQ ID NO: 1291 - RNA, 20 nt, synthetic construct
  source 1..20: mol_type = other RNA
ggctgcggtcctcggggaag

SEQ ID NO: 1292 - RNA, 20 nt, synthetic construct
  source 1..20: mol_type = other RNA
ggctggctgcggtcctcggg

SEQ ID NO: 1293 - RNA, 20 nt, synthetic construct
  source 1..20: mol_type = other RNA
ggctggggagaaggtggggg

SEQ ID NO: 1294 - RNA, 20 nt, synthetic construct
  source 1..20: mol_type = other RNA
gggaaggcggccagcttgtc

SEQ ID NO: 1295 - RNA, 20 nt, synthetic construct
  source 1..20: mol_type = other RNA
gggacaacgccaccttcacc

SEQ ID NO: 1296 - RNA, 20 nt, synthetic construct
  source 1..20: mol_type = other RNA
gggagatggccccacagagg

SEQ ID NO: 1297 - RNA, 20 nt, synthetic construct
  source 1..20: mol_type = other RNA
gggagtctgagagatggaga

SEQ ID NO: 1298 - RNA, 20 nt, synthetic construct
  source 1..20: mol_type = other RNA
gggcagagctcagggtgaca

SEQ ID NO: 1299 - RNA, 20 nt, synthetic construct
  source 1..20: mol_type = other RNA
gggcagttgtgtgacacgga

SEQ ID NO: 1300 - RNA, 20 nt, synthetic construct
  source 1..20: mol_type = other RNA
gggccagggagatggcccca

SEQ ID NO: 1301 - RNA, 20 nt, synthetic construct
  source 1..20: mol_type = other RNA
gggccatctccctggccccc

SEQ ID NO: 1302 - RNA, 20 nt, synthetic construct
  source 1..20: mol_type = other RNA
gggcccggcgcaatgacagc

SEQ ID NO: 1303 - RNA, 20 nt, synthetic construct
  source 1..20: mol_type = other RNA
gggccctgaccacgctcatg

SEQ ID NO: 1304 - RNA, 20 nt, synthetic construct
  source 1..20: mol_type = other RNA
gggcctccgaggccgcacct

SEQ ID NO: 1305 - RNA, 20 nt, synthetic construct
  source 1..20: mol_type = other RNA
gggcctgtctggggagtctg

SEQ ID NO: 1306 - RNA, 20 nt, synthetic construct
  source 1..20: mol_type = other RNA
gggcgtgacttccacatgag

SEQ ID NO: 1307 - RNA, 20 nt, synthetic construct
  source 1..20: mol_type = other RNA
gggctcatgcggtaccagtt

SEQ ID NO: 1308 - RNA, 20 nt, synthetic construct
  source 1..20: mol_type = other RNA
gggctggctgcggtcctcgg

SEQ ID NO: 1309 - RNA, 20 nt, synthetic construct
  source 1..20: mol_type = other RNA
gggctggggagaaggtgggg

SEQ ID NO: 1310 - RNA, 20 nt, synthetic construct
  source 1..20: mol_type = other RNA
ggggaaggcggccagcttgt

SEQ ID NO: 1311 - RNA, 20 nt, synthetic construct
  source 1..20: mol_type = other RNA
ggggacaacgccaccttcac

SEQ ID NO: 1312 - RNA, 20 nt, synthetic construct
  source 1..20: mol_type = other RNA
ggggagtctgagagatggag

SEQ ID NO: 1313 - RNA, 20 nt, synthetic construct
  source 1..20: mol_type = other RNA
ggggccagggagatggcccc

SEQ ID NO: 1314 - RNA, 20 nt, synthetic construct
  source 1..20: mol_type = other RNA
ggggccatctccctggcccc

SEQ ID NO: 1315 - RNA, 20 nt, synthetic construct
  source 1..20: mol_type = other RNA
ggggctcatgcggtaccagt

SEQ ID NO: 1316 - RNA, 20 nt, synthetic construct
  source 1..20: mol_type = other RNA
gggggccagggagatggccc

SEQ ID NO: 1317 - RNA, 20 nt, synthetic construct
  source 1..20: mol_type = other RNA
ggggggttccagggcctgtc

SEQ ID NO: 1318 - RNA, 20 nt, synthetic construct
  source 1..20: mol_type = other RNA
gggggttccagggcctgtct

SEQ ID NO: 1319 - RNA, 20 nt, synthetic construct
  source 1..20: mol_type = other RNA
ggggttccagggcctgtctg

SEQ ID NO: 1320 - RNA, 20 nt, synthetic construct
  source 1..20: mol_type = other RNA
gggtgacaggtgcggcctcg

SEQ ID NO: 1321 - RNA, 20 nt, synthetic construct
  source 1..20: mol_type = other RNA
gggttccagggcctgtctgg

SEQ ID NO: 1322 - RNA, 20 nt, synthetic construct
  source 1..20: mol_type = other RNA
ggtaccagtttagcacgaag

SEQ ID NO: 1323 - RNA, 20 nt, synthetic construct
  source 1..20: mol_type = other RNA
ggtaccgcatgagccccagc

SEQ ID NO: 1324 - RNA, 20 nt, synthetic construct
  source 1..20: mol_type = other RNA
ggtaggtgccgctgtcattg

SEQ ID NO: 1325 - RNA, 20 nt, synthetic construct
  source 1..20: mol_type = other RNA
ggtcaccacgagcagggctg

SEQ ID NO: 1326 - RNA, 20 nt, synthetic construct
  source 1..20: mol_type = other RNA
ggtcagggcccggcgcaatg

SEQ ID NO: 1327 - RNA, 20 nt, synthetic construct
  source 1..20: mol_type = other RNA
ggtcctcggggaaggcggcc

SEQ ID NO: 1328 - RNA, 20 nt, synthetic construct
  source 1..20: mol_type = other RNA
ggtgaaggtggcgttgtccc

SEQ ID NO: 1329 - RNA, 20 nt, synthetic construct
  source 1..20: mol_type = other RNA
ggtgacaggtgcggcctcgg

SEQ ID NO: 1330 - RNA, 20 nt, synthetic construct
  source 1..20: mol_type = other RNA
ggtgaccgaaggggacaacg

SEQ ID NO: 1331 - RNA, 20 nt, synthetic construct
  source 1..20: mol_type = other RNA
ggtgccgctgtcattgcgcc

SEQ ID NO: 1332 - RNA, 20 nt, synthetic construct
  source 1..20: mol_type = other RNA
ggtggcgttgtccccttcgg

SEQ ID NO: 1333 - RNA, 20 nt, synthetic construct
  source 1..20: mol_type = other RNA
ggttccagggcctgtctggg

SEQ ID NO: 1334 - RNA, 20 nt, synthetic construct
  source 1..20: mol_type = other RNA
ggttgctggggctcatgcgg

SEQ ID NO: 1335 - RNA, 20 nt, synthetic construct
  source 1..20: mol_type = other RNA
gtaccagtttagcacgaagc

SEQ ID NO: 1336 - RNA, 20 nt, synthetic construct
  source 1..20: mol_type = other RNA
gtaccgcatgagccccagca

SEQ ID NO: 1337 - RNA, 20 nt, synthetic construct
  source 1..20: mol_type = other RNA
gtaggtgccgctgtcattgc

SEQ ID NO: 1338 - RNA, 20 nt, synthetic construct
  source 1..20: mol_type = other RNA
gtcacacaactgcccaacgg

SEQ ID NO: 1339 - RNA, 20 nt, synthetic construct
  source 1..20: mol_type = other RNA
gtcaccacgagcagggctgg

SEQ ID NO: 1340 - RNA, 20 nt, synthetic construct
  source 1..20: mol_type = other RNA
gtcaccctgagctctgcccg

SEQ ID NO: 1341 - RNA, 20 nt, synthetic construct
  source 1..20: mol_type = other RNA
gtcacgcccgttgggcagtt

SEQ ID NO: 1342 - RNA, 20 nt, synthetic construct
  source 1..20: mol_type = other RNA
gtcagggcccggcgcaatga

SEQ ID NO: 1343 - RNA, 20 nt, synthetic construct
  source 1..20: mol_type = other RNA
gtcattgcgccgggccctga

SEQ ID NO: 1344 - RNA, 20 nt, synthetic construct
  source 1..20: mol_type = other RNA
gtccccttcggtcaccacga

SEQ ID NO: 1345 - RNA, 20 nt, synthetic construct
  source 1..20: mol_type = other RNA
gtccgtctggttgctggggc

SEQ ID NO: 1346 - RNA, 20 nt, synthetic construct
  source 1..20: mol_type = other RNA
gtcctcggggaaggcggcca

SEQ ID NO: 1347 - RNA, 20 nt, synthetic construct
  source 1..20: mol_type = other RNA
gtcctggccgggctggctgc

SEQ ID NO: 1348 - RNA, 20 nt, synthetic construct
  source 1..20: mol_type = other RNA
gtctgagagatggagagagg

SEQ ID NO: 1349 - RNA, 20 nt, synthetic construct
  source 1..20: mol_type = other RNA
gtctggggagtctgagagat

SEQ ID NO: 1350 - RNA, 20 nt, synthetic construct
  source 1..20: mol_type = other RNA
gtctggttgctggggctcat

SEQ ID NO: 1351 - RNA, 20 nt, synthetic construct
  source 1..20: mol_type = other RNA
gtgaaggtggcgttgtcccc

SEQ ID NO: 1352 - RNA, 20 nt, synthetic construct
  source 1..20: mol_type = other RNA
gtgacacggaagcggcagtc

SEQ ID NO: 1353 - RNA, 20 nt, synthetic construct
  source 1..20: mol_type = other RNA
gtgacaggtgcggcctcgga

SEQ ID NO: 1354 - RNA, 20 nt, synthetic construct
  source 1..20: mol_type = other RNA
gtgaccgaaggggacaacgc

SEQ ID NO: 1355 - RNA, 20 nt, synthetic construct
  source 1..20: mol_type = other RNA
gtgacttccacatgagcgtg

SEQ ID NO: 1356 - RNA, 20 nt, synthetic construct
  source 1..20: mol_type = other RNA
gtgccgctgtcattgcgccg

SEQ ID NO: 1357 - RNA, 20 nt, synthetic construct
  source 1..20: mol_type = other RNA
gtgctaaactggtaccgcat

SEQ ID NO: 1358 - RNA, 20 nt, synthetic construct
  source 1..20: mol_type = other RNA
gtggaagtcacgcccgttgg

SEQ ID NO: 1359 - RNA, 20 nt, synthetic construct
  source 1..20: mol_type = other RNA
gtggcgttgtccccttcggt

SEQ ID NO: 1360 - RNA, 20 nt, synthetic construct
  source 1..20: mol_type = other RNA
gtggggccatctccctggcc

SEQ ID NO: 1361 - RNA, 20 nt, synthetic construct
  source 1..20: mol_type = other RNA
gtggtcagggcccggcgcaa

SEQ ID NO: 1362 - RNA, 20 nt, synthetic construct
  source 1..20: mol_type = other RNA
gtggtgaccgaaggggacaa

SEQ ID NO: 1363 - RNA, 20 nt, synthetic construct
  source 1..20: mol_type = other RNA
gtgtcacacaactgcccaac

SEQ ID NO: 1364 - RNA, 20 nt, synthetic construct
  source 1..20: mol_type = other RNA
gtgtgacacggaagcggcag

SEQ ID NO: 1365 - RNA, 20 nt, synthetic construct
  source 1..20: mol_type = other RNA
gtgttggagaagctgcaggt

SEQ ID NO: 1366 - RNA, 20 nt, synthetic construct
  source 1..20: mol_type = other RNA
gttccagggcctgtctgggg

SEQ ID NO: 1367 - RNA, 20 nt, synthetic construct
  source 1..20: mol_type = other RNA
gttgctggggctcatgcggt

SEQ ID NO: 1368 - RNA, 20 nt, synthetic construct
  source 1..20: mol_type = other RNA
gttggagaagctgcaggtga

SEQ ID NO: 1369 - RNA, 20 nt, synthetic construct
  source 1..20: mol_type = other RNA
gttgggcagttgtgtgacac

SEQ ID NO: 1370 - RNA, 20 nt, synthetic construct
  source 1..20: mol_type = other RNA
gttgtccccttcggtcacca

SEQ ID NO: 1371 - RNA, 20 nt, synthetic construct
  source 1..20: mol_type = other RNA
gttgtgtgacacggaagcgg

SEQ ID NO: 1372 - RNA, 20 nt, synthetic construct
  source 1..20: mol_type = other RNA
gtttagcacgaagctctccg

SEQ ID NO: 1373 - RNA, 20 nt, synthetic construct
  source 1..20: mol_type = other RNA
taaactggtaccgcatgagc

SEQ ID NO: 1374 - RNA, 20 nt, synthetic construct
  source 1..20: mol_type = other RNA
taccagtttagcacgaagct

SEQ ID NO: 1375 - RNA, 20 nt, synthetic construct
  source 1..20: mol_type = other RNA
taccgcatgagccccagcaa

SEQ ID NO: 1376 - RNA, 20 nt, synthetic construct
  source 1..20: mol_type = other RNA
tacctctgtggggccatctc

SEQ ID NO: 1377 - RNA, 20 nt, synthetic construct
  source 1..20: mol_type = other RNA
tagcacgaagctctccgatg

SEQ ID NO: 1378 - RNA, 20 nt, synthetic construct
  source 1..20: mol_type = other RNA
taggtgccgctgtcattgcg

SEQ ID NO: 1379 - RNA, 20 nt, synthetic construct
  source 1..20: mol_type = other RNA
tcaaagagagcctgcgggca

SEQ ID NO: 1380 - RNA, 20 nt, synthetic construct
  source 1..20: mol_type = other RNA
tcacacaactgcccaacggg

SEQ ID NO: 1381 - RNA, 20 nt, synthetic construct
  source 1..20: mol_type = other RNA
tcaccacgagcagggctggg

SEQ ID NO: 1382 - RNA, 20 nt, synthetic construct
  source 1..20: mol_type = other RNA
tcacccctgccccggggcct

SEQ ID NO: 1383 - RNA, 20 nt, synthetic construct
  source 1..20: mol_type = other RNA
tcaccctgagctctgcccgc

SEQ ID NO: 1384 - RNA, 20 nt, synthetic construct
  source 1..20: mol_type = other RNA
tcacctctctccatctctca

SEQ ID NO: 1385 - RNA, 20 nt, synthetic construct
  source 1..20: mol_type = other RNA
tcacctgcagcttctccaac

SEQ ID NO: 1386 - RNA, 20 nt, synthetic construct
  source 1..20: mol_type = other RNA
tcacgcccgttgggcagttg

SEQ ID NO: 1387 - RNA, 20 nt, synthetic construct
  source 1..20: mol_type = other RNA
tcagactccccagacaggcc

SEQ ID NO: 1388 - RNA, 20 nt, synthetic construct
  source 1..20: mol_type = other RNA
tcagctcacccctgccccgg

SEQ ID NO: 1389 - RNA, 20 nt, synthetic construct
  source 1..20: mol_type = other RNA
tcagggcccggcgcaatgac

SEQ ID NO: 1390 - RNA, 20 nt, synthetic construct
  source 1..20: mol_type = other RNA
tcagggtgacaggtgcggcc

SEQ ID NO: 1391 - RNA, 20 nt, synthetic construct
  source 1..20: mol_type = other RNA
tcatgcggtaccagtttagc

SEQ ID NO: 1392 - RNA, 20 nt, synthetic construct
  source 1..20: mol_type = other RNA
tcatgtggaagtcacgcccg

SEQ ID NO: 1393 - RNA, 20 nt, synthetic construct
  source 1..20: mol_type = other RNA
tcattgcgccgggccctgac

SEQ ID NO: 1394 - RNA, 20 nt, synthetic construct
  source 1..20: mol_type = other RNA
tccaacacatcggagagctt

SEQ ID NO: 1395 - RNA, 20 nt, synthetic construct
  source 1..20: mol_type = other RNA
tccacatgagcgtggtcagg

SEQ ID NO: 1396 - RNA, 20 nt, synthetic construct
  source 1..20: mol_type = other RNA
tccagggcctgtctggggag

SEQ ID NO: 1397 - RNA, 20 nt, synthetic construct
  source 1..20: mol_type = other RNA
tccatctctcagactcccca

SEQ ID NO: 1398 - RNA, 20 nt, synthetic construct
  source 1..20: mol_type = other RNA
tccccagacaggccctggaa

SEQ ID NO: 1399 - RNA, 20 nt, synthetic construct
  source 1..20: mol_type = other RNA
tccccagccctgctcgtggt

SEQ ID NO: 1400 - RNA, 20 nt, synthetic construct
  source 1..20: mol_type = other RNA
tccccgaggaccgcagccag

SEQ ID NO: 1401 - RNA, 20 nt, synthetic construct
  source 1..20: mol_type = other RNA
tccccttcggtcaccacgag

SEQ ID NO: 1402 - RNA, 20 nt, synthetic construct
  source 1..20: mol_type = other RNA
tccctggcccccaaggcgca

SEQ ID NO: 1403 - RNA, 20 nt, synthetic construct
  source 1..20: mol_type = other RNA
tccgaggccgcacctgtcac

SEQ ID NO: 1404 - RNA, 20 nt, synthetic construct
  source 1..20: mol_type = other RNA
tccgatgtgttggagaagct

SEQ ID NO: 1405 - RNA, 20 nt, synthetic construct
  source 1..20: mol_type = other RNA
tccgtctggttgctggggct

SEQ ID NO: 1406 - RNA, 20 nt, synthetic construct
  source 1..20: mol_type = other RNA
tccgtgtcacacaactgccc

SEQ ID NO: 1407 - RNA, 20 nt, synthetic construct
  source 1..20: mol_type = other RNA
tcctcacctctctccatctc

SEQ ID NO: 1408 - RNA, 20 nt, synthetic construct
  source 1..20: mol_type = other RNA
tcctcggggaaggcggccag

SEQ ID NO: 1409 - RNA, 20 nt, synthetic construct
  source 1..20: mol_type = other RNA
tcctggccgggctggctgcg

SEQ ID NO: 1410 - RNA, 20 nt, synthetic construct
  source 1..20: mol_type = other RNA
tcggagagcttcgtgctaaa

SEQ ID NO: 1411 - RNA, 20 nt, synthetic construct
  source 1..20: mol_type = other RNA
tcggggaaggcggccagctt

SEQ ID NO: 1412 - RNA, 20 nt, synthetic construct
  source 1..20: mol_type = other RNA
tcggtcaccacgagcagggc

SEQ ID NO: 1413 - RNA, 20 nt, synthetic construct
  source 1..20: mol_type = other RNA
tcgtgctaaactggtaccgc

SEQ ID NO: 1414 - RNA, 20 nt, synthetic construct
  source 1..20: mol_type = other RNA
tcgtggtgaccgaaggggac

SEQ ID NO: 1415 - RNA, 20 nt, synthetic construct
  source 1..20: mol_type = other RNA
tctcagactccccagacagg

SEQ ID NO: 1416 - RNA, 20 nt, synthetic construct
  source 1..20: mol_type = other RNA
tctccaacacatcggagagc

SEQ ID NO: 1417 - RNA, 20 nt, synthetic construct
  source 1..20: mol_type = other RNA
tctccatctctcagactccc

SEQ ID NO: 1418 - RNA, 20 nt, synthetic construct
  source 1..20: mol_type = other RNA
tctccccagccctgctcgtg

SEQ ID NO: 1419 - RNA, 20 nt, synthetic construct
  source 1..20: mol_type = other RNA
tctccctggcccccaaggcg

SEQ ID NO: 1420 - RNA, 20 nt, synthetic construct
  source 1..20: mol_type = other RNA
tctccgatgtgttggagaag

SEQ ID NO: 1421 - RNA, 20 nt, synthetic construct
  source 1..20: mol_type = other RNA
tctctcagactccccagaca

SEQ ID NO: 1422 - RNA, 20 nt, synthetic construct
  source 1..20: mol_type = other RNA
tctctccatctctcagactc

SEQ ID NO: 1423 - RNA, 20 nt, synthetic construct
  source 1..20: mol_type = other RNA
tctctttgatctgcgccttg

SEQ ID NO: 1424 - RNA, 20 nt, synthetic construct
  source 1..20: mol_type = other RNA
tctgagagatggagagaggt

SEQ ID NO: 1425 - RNA, 20 nt, synthetic construct
  source 1..20: mol_type = other RNA
tctgcccgcaggctctcttt

SEQ ID NO: 1426 - RNA, 20 nt, synthetic construct
  source 1..20: mol_type = other RNA
tctgcgccttgggggccagg

SEQ ID NO: 1427 - RNA, 20 nt, synthetic construct
  source 1..20: mol_type = other RNA
tctggggagtctgagagatg

SEQ ID NO: 1428 - RNA, 20 nt, synthetic construct
  source 1..20: mol_type = other RNA
tctggttgctggggctcatg

SEQ ID NO: 1429 - RNA, 20 nt, synthetic construct
  source 1..20: mol_type = other RNA
tctgtggggccatctccctg

SEQ ID NO: 1430 - RNA, 20 nt, synthetic construct
  source 1..20: mol_type = other RNA
tctttgatctgcgccttggg

SEQ ID NO: 1431 - RNA, 20 nt, synthetic construct
  source 1..20: mol_type = other RNA
tgaaggtggcgttgtcccct

SEQ ID NO: 1432 - RNA, 20 nt, synthetic construct
  source 1..20: mol_type = other RNA
tgacacggaagcggcagtcc

SEQ ID NO: 1433 - RNA, 20 nt, synthetic construct
  source 1..20: mol_type = other RNA
tgacagcggcacctacctct

SEQ ID NO: 1434 - RNA, 20 nt, synthetic construct
  source 1..20: mol_type = other RNA
tgacaggtgcggcctcggag

SEQ ID NO: 1435 - RNA, 20 nt, synthetic construct
  source 1..20: mol_type = other RNA
tgaccacgctcatgtggaag

SEQ ID NO: 1436 - RNA, 20 nt, synthetic construct
  source 1..20: mol_type = other RNA
tgaccgaaggggacaacgcc

SEQ ID NO: 1437 - RNA, 20 nt, synthetic construct
  source 1..20: mol_type = other RNA
tgacttccacatgagcgtgg

SEQ ID NO: 1438 - RNA, 20 nt, synthetic construct
  source 1..20: mol_type = other RNA
tgagagatggagagaggtga

SEQ ID NO: 1439 - RNA, 20 nt, synthetic construct
  source 1..20: mol_type = other RNA
tgagccccagcaaccagacg

SEQ ID NO: 1440 - RNA, 20 nt, synthetic construct
  source 1..20: mol_type = other RNA
tgagcgtggtcagggcccgg

SEQ ID NO: 1441 - RNA, 20 nt, synthetic construct
  source 1..20: mol_type = other RNA
tgagctctgcccgcaggctc

SEQ ID NO: 1442 - RNA, 20 nt, synthetic construct
  source 1..20: mol_type = other RNA
tgatctgcgccttgggggcc

SEQ ID NO: 1443 - RNA, 20 nt, synthetic construct
  source 1..20: mol_type = other RNA
tgcagcttctccaacacatc

SEQ ID NO: 1444 - RNA, 20 nt, synthetic construct
  source 1..20: mol_type = other RNA
tgcaggtgaaggtggcgttg

SEQ ID NO: 1445 - RNA, 20 nt, synthetic construct
  source 1..20: mol_type = other RNA
tgcccaacgggcgtgacttc

SEQ ID NO: 1446 - RNA, 20 nt, synthetic construct
  source 1..20: mol_type = other RNA
tgcccgcaggctctctttga

SEQ ID NO: 1447 - RNA, 20 nt, synthetic construct
  source 1..20: mol_type = other RNA
tgccgctgtcattgcgccgg

SEQ ID NO: 1448 - RNA, 20 nt, synthetic construct
  source 1..20: mol_type = other RNA
tgccgcttccgtgtcacaca

SEQ ID NO: 1449 - RNA, 20 nt, synthetic construct
  source 1..20: mol_type = other RNA
tgcgccgggccctgaccacg

SEQ ID NO: 1450 - RNA, 20 nt, synthetic construct
  source 1..20: mol_type = other RNA
tgcgccttgggggccaggga

SEQ ID NO: 1451 - RNA, 20 nt, synthetic construct
  source 1..20: mol_type = other RNA
tgcgggcagagctcagggtg

SEQ ID NO: 1452 - RNA, 20 nt, synthetic construct
  source 1..20: mol_type = other RNA
tgcggtaccagtttagcacg

SEQ ID NO: 1453 - RNA, 20 nt, synthetic construct
  source 1..20: mol_type = other RNA
tgcggtcctcggggaaggcg

SEQ ID NO: 1454 - RNA, 20 nt, synthetic construct
  source 1..20: mol_type = other RNA
tgctaaactggtaccgcatg

SEQ ID NO: 1455 - RNA, 20 nt, synthetic construct
  source 1..20: mol_type = other RNA
tgctcgtggtgaccgaaggg

SEQ ID NO: 1456 - RNA, 20 nt, synthetic construct
  source 1..20: mol_type = other RNA
tgctggggctcatgcggtac

SEQ ID NO: 1457 - RNA, 20 nt, synthetic construct
  source 1..20: mol_type = other RNA
tggaagtcacgcccgttggg

SEQ ID NO: 1458 - RNA, 20 nt, synthetic construct
  source 1..20: mol_type = other RNA
tggagaagctgcaggtgaag

SEQ ID NO: 1459 - RNA, 20 nt, synthetic construct
  source 1..20: mol_type = other RNA
tggagagaggtgaggaaggg

SEQ ID NO: 1460 - RNA, 20 nt, synthetic construct
  source 1..20: mol_type = other RNA
tggccccacagaggtaggtg

SEQ ID NO: 1461 - RNA, 20 nt, synthetic construct
  source 1..20: mol_type = other RNA
tggcccccaaggcgcagatc

SEQ ID NO: 1462 - RNA, 20 nt, synthetic construct
  source 1..20: mol_type = other RNA
tggccgccttccccgaggac

SEQ ID NO: 1463 - RNA, 20 nt, synthetic construct
  source 1..20: mol_type = other RNA
tggccgggctggctgcggtc

SEQ ID NO: 1464 - RNA, 20 nt, synthetic construct
  source 1..20: mol_type = other RNA
tggcgttgtccccttcggtc

SEQ ID NO: 1465 - RNA, 20 nt, synthetic construct
  source 1..20: mol_type = other RNA
tggctgcggtcctcggggaa

SEQ ID NO: 1466 - RNA, 20 nt, synthetic construct
  source 1..20: mol_type = other RNA
tgggcagttgtgtgacacgg

SEQ ID NO: 1467 - RNA, 20 nt, synthetic construct
  source 1..20: mol_type = other RNA
tggggagtctgagagatgga

SEQ ID NO: 1468 - RNA, 20 nt, synthetic construct
  source 1..20: mol_type = other RNA
tggggccatctccctggccc

SEQ ID NO: 1469 - RNA, 20 nt, synthetic construct
  source 1..20: mol_type = other RNA
tggggctcatgcggtaccag

SEQ ID NO: 1470 - RNA, 20 nt, synthetic construct
  source 1..20: mol_type = other RNA
tgggggccagggagatggcc

SEQ ID NO: 1471 - RNA, 20 nt, synthetic construct
  source 1..20: mol_type = other RNA
tggtaccgcatgagccccag

SEQ ID NO: 1472 - RNA, 20 nt, synthetic construct
  source 1..20: mol_type = other RNA
tggtcagggcccggcgcaat

SEQ ID NO: 1473 - RNA, 20 nt, synthetic construct
  source 1..20: mol_type = other RNA
tggtgaccgaaggggacaac

SEQ ID NO: 1474 - RNA, 20 nt, synthetic construct
  source 1..20: mol_type = other RNA
tggttgctggggctcatgcg

SEQ ID NO: 1475 - RNA, 20 nt, synthetic construct
  source 1..20: mol_type = other RNA
tgtcacacaactgcccaacg

SEQ ID NO: 1476 - RNA, 20 nt, synthetic construct
  source 1..20: mol_type = other RNA
tgtcaccctgagctctgccc

SEQ ID NO: 1477 - RNA, 20 nt, synthetic construct
  source 1..20: mol_type = other RNA
tgtcattgcgccgggccctg

SEQ ID NO: 1478 - RNA, 20 nt, synthetic construct
  source 1..20: mol_type = other RNA
tgtccccttcggtcaccacg

SEQ ID NO: 1479 - RNA, 20 nt, synthetic construct
  source 1..20: mol_type = other RNA
tgtccgtctggttgctgggg

SEQ ID NO: 1480 - RNA, 20 nt, synthetic construct
  source 1..20: mol_type = other RNA
tgtctggggagtctgagaga

SEQ ID NO: 1481 - RNA, 20 nt, synthetic construct
  source 1..20: mol_type = other RNA
tgtgacacggaagcggcagt

SEQ ID NO: 1482 - RNA, 20 nt, synthetic construct
  source 1..20: mol_type = other RNA
tgtggaagtcacgcccgttg

SEQ ID NO: 1483 - RNA, 20 nt, synthetic construct
  source 1..20: mol_type = other RNA
tgtggggccatctccctggc

SEQ ID NO: 1484 - RNA, 20 nt, synthetic construct
  source 1..20: mol_type = other RNA
tgtgtgacacggaagcggca

SEQ ID NO: 1485 - RNA, 20 nt, synthetic construct
  source 1..20: mol_type = other RNA
tgtgttggagaagctgcagg

SEQ ID NO: 1486 - RNA, 20 nt, synthetic construct
  source 1..20: mol_type = other RNA
tgttggagaagctgcaggtg

SEQ ID NO: 1487 - RNA, 20 nt, synthetic construct
  source 1..20: mol_type = other RNA
ttagcacgaagctctccgat

SEQ ID NO: 1488 - RNA, 20 nt, synthetic construct
  source 1..20: mol_type = other RNA
ttcacctgcagcttctccaa

SEQ ID NO: 1489 - RNA, 20 nt, synthetic construct
  source 1..20: mol_type = other RNA
ttccacatgagcgtggtcag

SEQ ID NO: 1490 - RNA, 20 nt, synthetic construct
  source 1..20: mol_type = other RNA
ttccagggcctgtctgggga

SEQ ID NO: 1491 - RNA, 20 nt, synthetic construct
  source 1..20: mol_type = other RNA
ttccccgaggaccgcagcca

SEQ ID NO: 1492 - RNA, 20 nt, synthetic construct
  source 1..20: mol_type = other RNA
ttccgtgtcacacaactgcc

SEQ ID NO: 1493 - RNA, 20 nt, synthetic construct
  source 1..20: mol_type = other RNA
ttcctcacctctctccatct

SEQ ID NO: 1494 - RNA, 20 nt, synthetic construct
  source 1..20: mol_type = other RNA
ttcggtcaccacgagcaggg

SEQ ID NO: 1495 - RNA, 20 nt, synthetic construct
  source 1..20: mol_type = other RNA
ttcgtgctaaactggtaccg

SEQ ID NO: 1496 - RNA, 20 nt, synthetic construct
  source 1..20: mol_type = other RNA
ttctccaacacatcggagag

SEQ ID NO: 1497 - RNA, 20 nt, synthetic construct
  source 1..20: mol_type = other RNA
ttctccccagccctgctcgt

SEQ ID NO: 1498 - RNA, 20 nt, synthetic construct
  source 1..20: mol_type = other RNA
ttgatctgcgccttgggggc

SEQ ID NO: 1499 - RNA, 20 nt, synthetic construct
  source 1..20: mol_type = other RNA
ttgcgccgggccctgaccac

SEQ ID NO: 1500 - RNA, 20 nt, synthetic construct
  source 1..20: mol_type = other RNA
ttgctggggctcatgcggta

SEQ ID NO: 1501 - RNA, 20 nt, synthetic construct
  source 1..20: mol_type = other RNA
ttggagaagctgcaggtgaa

SEQ ID NO: 1502 - RNA, 20 nt, synthetic construct
  source 1..20: mol_type = other RNA
ttgggcagttgtgtgacacg

SEQ ID NO: 1503 - RNA, 20 nt, synthetic construct
  source 1..20: mol_type = other RNA
ttgggggccagggagatggc

SEQ ID NO: 1504 - RNA, 20 nt, synthetic construct
  source 1..20: mol_type = other RNA
ttgtccccttcggtcaccac

SEQ ID NO: 1505 - RNA, 20 nt, synthetic construct
  source 1..20: mol_type = other RNA
ttgtccgtctggttgctggg

SEQ ID NO: 1506 - RNA, 20 nt, synthetic construct
  source 1..20: mol_type = other RNA
ttgtgtgacacggaagcggc

SEQ ID NO: 1507 - RNA, 20 nt, synthetic construct
  source 1..20: mol_type = other RNA
tttagcacgaagctctccga

SEQ ID NO: 1508 - RNA, 20 nt, synthetic construct
  source 1..20: mol_type = other RNA
tttgatctgcgccttggggg

SEQ ID NO: 1509 - RNA, 21 nt, synthetic construct
  source 1..21: mol_type = other RNA
aaactggtaccgcatgagccc

SEQ ID NO: 1510 - RNA, 21 nt, synthetic construct
  source 1..21: mol_type = other RNA
aaagagagcctgcgggcagag

SEQ ID NO: 1511 - RNA, 21 nt, synthetic construct
  source 1..21: mol_type = other RNA
aacacatcggagagcttcgtg

SEQ ID NO: 1512 - RNA, 21 nt, synthetic construct
  source 1..21: mol_type = other RNA
aaccagacggacaagctggcc

SEQ ID NO: 1513 - RNA, 21 nt, synthetic construct
  source 1..21: mol_type = other RNA
aacgccaccttcacctgcagc

SEQ ID NO: 1514 - RNA, 21 nt, synthetic construct
  source 1..21: mol_type = other RNA
aacgggcgtgacttccacatg

SEQ ID NO: 1515 - RNA, 21 nt, synthetic construct
  source 1..21: mol_type = other RNA
aactgcccaacgggcgtgact

SEQ ID NO: 1516 - RNA, 21 nt, synthetic construct
  source 1..21: mol_type = other RNA
aactggtaccgcatgagcccc

SEQ ID NO: 1517 - RNA, 21 nt, synthetic construct
  source 1..21: mol_type = other RNA
aagagagcctgcgggcagagc

SEQ ID NO: 1518 - RNA, 21 nt, synthetic construct
  source 1..21: mol_type = other RNA
aagcggcagtcctggccgggc

SEQ ID NO: 1519 - RNA, 21 nt, synthetic construct
  source 1..21: mol_type = other RNA
aagctctccgatgtgttggag

SEQ ID NO: 1520 - RNA, 21 nt, synthetic construct
  source 1..21: mol_type = other RNA
aagctgcaggtgaaggtggcg

SEQ ID NO: 1521 - RNA, 21 nt, synthetic construct
  source 1..21: mol_type = other RNA
aagctggccgccttccccgag

SEQ ID NO: 1522 - RNA, 21 nt, synthetic construct
  source 1..21: mol_type = other RNA
aaggcgcagatcaaagagagc

SEQ ID NO: 1523 - RNA, 21 nt, synthetic construct
  source 1..21: mol_type = other RNA
aaggcggccagcttgtccgtc

SEQ ID NO: 1524 - RNA, 21 nt, synthetic construct
  source 1..21: mol_type = other RNA
aaggggacaacgccaccttca

SEQ ID NO: 1525 - RNA, 21 nt, synthetic construct
  source 1..21: mol_type = other RNA
aaggtggcgttgtccccttcg

SEQ ID NO: 1526 - RNA, 21 nt, synthetic construct
  source 1..21: mol_type = other RNA
aagtcacgcccgttgggcagt

SEQ ID NO: 1527 - RNA, 21 nt, synthetic construct
  source 1..21: mol_type = other RNA
aatgacagcggcacctacctc

SEQ ID NO: 1528 - RNA, 21 nt, synthetic construct
  source 1..21: mol_type = other RNA
acaacgccaccttcacctgca

SEQ ID NO: 1529 - RNA, 21 nt, synthetic construct
  source 1..21: mol_type = other RNA
acaactgcccaacgggcgtga

SEQ ID NO: 1530 - RNA, 21 nt, synthetic construct
  source 1..21: mol_type = other RNA
acaagctggccgccttccccg

SEQ ID NO: 1531 - RNA, 21 nt, synthetic construct
  source 1..21: mol_type = other RNA
acacaactgcccaacgggcgt

SEQ ID NO: 1532 - RNA, 21 nt, synthetic construct
  source 1..21: mol_type = other RNA
acacatcggagagcttcgtgc

SEQ ID NO: 1533 - RNA, 21 nt, synthetic construct
  source 1..21: mol_type = other RNA
acacggaagcggcagtcctgg

SEQ ID NO: 1534 - RNA, 21 nt, synthetic construct
  source 1..21: mol_type = other RNA
acagaggtaggtgccgctgtc

SEQ ID NO: 1535 - RNA, 21 nt, synthetic construct
  source 1..21: mol_type = other RNA
acagcggcacctacctctgtg

SEQ ID NO: 1536 - RNA, 21 nt, synthetic construct
  source 1..21: mol_type = other RNA
acaggtgcggcctcggaggcc

SEQ ID NO: 1537 - RNA, 21 nt, synthetic construct
  source 1..21: mol_type = other RNA
acatcggagagcttcgtgcta

SEQ ID NO: 1538 - RNA, 21 nt, synthetic construct
  source 1..21: mol_type = other RNA
acatgagcgtggtcagggccc

SEQ ID NO: 1539 - RNA, 21 nt, synthetic construct
  source 1..21: mol_type = other RNA
accacgagcagggctggggag

SEQ ID NO: 1540 - RNA, 21 nt, synthetic construct
  source 1..21: mol_type = other RNA
accacgctcatgtggaagtca

SEQ ID NO: 1541 - RNA, 21 nt, synthetic construct
  source 1..21: mol_type = other RNA
accagacggacaagctggccg

SEQ ID NO: 1542 - RNA, 21 nt, synthetic construct
  source 1..21: mol_type = other RNA
accagtttagcacgaagctct

SEQ ID NO: 1543 - RNA, 21 nt, synthetic construct
  source 1..21: mol_type = other RNA
acccagccccttcctcacctc

SEQ ID NO: 1544 - RNA, 21 nt, synthetic construct
  source 1..21: mol_type = other RNA
accctgagctctgcccgcagg

SEQ ID NO: 1545 - RNA, 21 nt, synthetic construct
  source 1..21: mol_type = other RNA
accgaaggggacaacgccacc

SEQ ID NO: 1546 - RNA, 21 nt, synthetic construct
  source 1..21: mol_type = other RNA
accgcatgagccccagcaacc

SEQ ID NO: 1547 - RNA, 21 nt, synthetic construct
  source 1..21: mol_type = other RNA
acctacctctgtggggccatc

SEQ ID NO: 1548 - RNA, 21 nt, synthetic construct
  source 1..21: mol_type = other RNA
acctctctccatctctcagac

SEQ ID NO: 1549 - RNA, 21 nt, synthetic construct
  source 1..21: mol_type = other RNA
acctctgtggggccatctccc

SEQ ID NO: 1550 - RNA, 21 nt, synthetic construct
  source 1..21: mol_type = other RNA
acctgcagcttctccaacaca

SEQ ID NO: 1551 - RNA, 21 nt, synthetic construct
  source 1..21: mol_type = other RNA
acctgtcaccctgagctctgc

SEQ ID NO: 1552 - RNA, 21 nt, synthetic construct
  source 1..21: mol_type = other RNA
accttcacctgcagcttctcc

SEQ ID NO: 1553 - RNA, 21 nt, synthetic construct
  source 1..21: mol_type = other RNA
accttctccccagccctgctc

SEQ ID NO: 1554 - RNA, 21 nt, synthetic construct
  source 1..21: mol_type = other RNA
acgaagctctccgatgtgttg

SEQ ID NO: 1555 - RNA, 21 nt, synthetic construct
  source 1..21: mol_type = other RNA
acgagcagggctggggagaag

SEQ ID NO: 1556 - RNA, 21 nt, synthetic construct
  source 1..21: mol_type = other RNA
acgccaccttcacctgcagct

SEQ ID NO: 1557 - RNA, 21 nt, synthetic construct
  source 1..21: mol_type = other RNA
acgcccgttgggcagttgtgt

SEQ ID NO: 1558 - RNA, 21 nt, synthetic construct
  source 1..21: mol_type = other RNA
acgctcatgtggaagtcacgc

SEQ ID NO: 1559 - RNA, 21 nt, synthetic construct
  source 1..21: mol_type = other RNA
acggaagcggcagtcctggcc

SEQ ID NO: 1560 - RNA, 21 nt, synthetic construct
  source 1..21: mol_type = other RNA
acggacaagctggccgccttc

SEQ ID NO: 1561 - RNA, 21 nt, synthetic construct
  source 1..21: mol_type = other RNA
acgggcgtgacttccacatga

SEQ ID NO: 1562 - RNA, 21 nt, synthetic construct
  source 1..21: mol_type = other RNA
actccccagacaggccctgga

SEQ ID NO: 1563 - RNA, 21 nt, synthetic construct
  source 1..21: mol_type = other RNA
actgcccaacgggcgtgactt

SEQ ID NO: 1564 - RNA, 21 nt, synthetic construct
  source 1..21: mol_type = other RNA
actgccgcttccgtgtcacac

SEQ ID NO: 1565 - RNA, 21 nt, synthetic construct
  source 1..21: mol_type = other RNA
actggtaccgcatgagcccca

SEQ ID NO: 1566 - RNA, 21 nt, synthetic construct
  source 1..21: mol_type = other RNA
acttccacatgagcgtggtca

SEQ ID NO: 1567 - RNA, 21 nt, synthetic construct
  source 1..21: mol_type = other RNA
agaagctgcaggtgaaggtgg

SEQ ID NO: 1568 - RNA, 21 nt, synthetic construct
  source 1..21: mol_type = other RNA
agacaggccctggaacccccc

SEQ ID NO: 1569 - RNA, 21 nt, synthetic construct
  source 1..21: mol_type = other RNA
agacggacaagctggccgcct

SEQ ID NO: 1570 - RNA, 21 nt, synthetic construct
  source 1..21: mol_type = other RNA
agactccccagacaggccctg

SEQ ID NO: 1571 - RNA, 21 nt, synthetic construct
  source 1..21: mol_type = other RNA
agagagcctgcgggcagagct

SEQ ID NO: 1572 - RNA, 21 nt, synthetic construct
  source 1..21: mol_type = other RNA
agagatggagagaggtgagga

SEQ ID NO: 1573 - RNA, 21 nt, synthetic construct
  source 1..21: mol_type = other RNA
agagcctgcgggcagagctca

SEQ ID NO: 1574 - RNA, 21 nt, synthetic construct
  source 1..21: mol_type = other RNA
agagctcagggtgacaggtgc

SEQ ID NO: 1575 - RNA, 21 nt, synthetic construct
  source 1..21: mol_type = other RNA
agagcttcgtgctaaactggt

SEQ ID NO: 1576 - RNA, 21 nt, synthetic construct
  source 1..21: mol_type = other RNA
agaggtaggtgccgctgtcat

SEQ ID NO: 1577 - RNA, 21 nt, synthetic construct
  source 1..21: mol_type = other RNA
agatcaaagagagcctgcggg

SEQ ID NO: 1578 - RNA, 21 nt, synthetic construct
  source 1..21: mol_type = other RNA
agatggagagaggtgaggaag

SEQ ID NO: 1579 - RNA, 21 nt, synthetic construct
  source 1..21: mol_type = other RNA
agatggccccacagaggtagg

SEQ ID NO: 1580 - RNA, 21 nt, synthetic construct
  source 1..21: mol_type = other RNA
agcaaccagacggacaagctg

SEQ ID NO: 1581 - RNA, 21 nt, synthetic construct
  source 1..21: mol_type = other RNA
agcacgaagctctccgatgtg

SEQ ID NO: 1582 - RNA, 21 nt, synthetic construct
  source 1..21: mol_type = other RNA
agcagggctggggagaaggtg

SEQ ID NO: 1583 - RNA, 21 nt, synthetic construct
  source 1..21: mol_type = other RNA
agccagcccggccaggactgc

SEQ ID NO: 1584 - RNA, 21 nt, synthetic construct
  source 1..21: mol_type = other RNA
agccccagcaaccagacggac

SEQ ID NO: 1585 - RNA, 21 nt, synthetic construct
  source 1..21: mol_type = other RNA
agccccttcctcacctctctc

SEQ ID NO: 1586 - RNA, 21 nt, synthetic construct
  source 1..21: mol_type = other RNA
agcccggccaggactgccgct

SEQ ID NO: 1587 - RNA, 21 nt, synthetic construct
  source 1..21: mol_type = other RNA
agccctgctcgtggtgaccga

SEQ ID NO: 1588 - RNA, 21 nt, synthetic construct
  source 1..21: mol_type = other RNA
agcctgcgggcagagctcagg

SEQ ID NO: 1589 - RNA, 21 nt, synthetic construct
  source 1..21: mol_type = other RNA
agcggcacctacctctgtggg

SEQ ID NO: 1590 - RNA, 21 nt, synthetic construct
  source 1..21: mol_type = other RNA
agcggcagtcctggccgggct

SEQ ID NO: 1591 - RNA, 21 nt, synthetic construct
  source 1..21: mol_type = other RNA
agctcagggtgacaggtgcgg

SEQ ID NO: 1592 - RNA, 21 nt, synthetic construct
  source 1..21: mol_type = other RNA
agctctccgatgtgttggaga

SEQ ID NO: 1593 - RNA, 21 nt, synthetic construct
  source 1..21: mol_type = other RNA
agctctgcccgcaggctctct

SEQ ID NO: 1594 - RNA, 21 nt, synthetic construct
  source 1..21: mol_type = other RNA
agctgcaggtgaaggtggcgt

SEQ ID NO: 1595 - RNA, 21 nt, synthetic construct
  source 1..21: mol_type = other RNA
agctggccgccttccccgagg

SEQ ID NO: 1596 - RNA, 21 nt, synthetic construct
  source 1..21: mol_type = other RNA
agcttcgtgctaaactggtac

SEQ ID NO: 1597 - RNA, 21 nt, synthetic construct
  source 1..21: mol_type = other RNA
agcttctccaacacatcggag

SEQ ID NO: 1598 - RNA, 21 nt, synthetic construct
  source 1..21: mol_type = other RNA
agcttgtccgtctggttgctg

SEQ ID NO: 1599 - RNA, 21 nt, synthetic construct
  source 1..21: mol_type = other RNA
aggactgccgcttccgtgtca

SEQ ID NO: 1600 - RNA, 21 nt, synthetic construct
  source 1..21: mol_type = other RNA
aggccgcacctgtcaccctga

SEQ ID NO: 1601 - RNA, 21 nt, synthetic construct
  source 1..21: mol_type = other RNA
aggcgcagatcaaagagagcc

SEQ ID NO: 1602 - RNA, 21 nt, synthetic construct
  source 1..21: mol_type = other RNA
aggcggccagcttgtccgtct

SEQ ID NO: 1603 - RNA, 21 nt, synthetic construct
  source 1..21: mol_type = other RNA
aggctctctttgatctgcgcc

SEQ ID NO: 1604 - RNA, 21 nt, synthetic construct
  source 1..21: mol_type = other RNA
agggagatggccccacagagg

SEQ ID NO: 1605 - RNA, 21 nt, synthetic construct
  source 1..21: mol_type = other RNA
agggcccggcgcaatgacagc

SEQ ID NO: 1606 - RNA, 21 nt, synthetic construct
  source 1..21: mol_type = other RNA
agggcctgtctggggagtctg

SEQ ID NO: 1607 - RNA, 21 nt, synthetic construct
  source 1..21: mol_type = other RNA
agggctggggagaaggtgggg

SEQ ID NO: 1608 - RNA, 21 nt, synthetic construct
  source 1..21: mol_type = other RNA
aggggacaacgccaccttcac

SEQ ID NO: 1609 - RNA, 21 nt, synthetic construct
  source 1..21: mol_type = other RNA
agggtgacaggtgcggcctcg

SEQ ID NO: 1610 - RNA, 21 nt, synthetic construct
  source 1..21: mol_type = other RNA
aggtaggtgccgctgtcattg

SEQ ID NO: 1611 - RNA, 21 nt, synthetic construct
  source 1..21: mol_type = other RNA
aggtgaaggtggcgttgtccc

SEQ ID NO: 1612 - RNA, 21 nt, synthetic construct
  source 1..21: mol_type = other RNA
aggtgccgctgtcattgcgcc

SEQ ID NO: 1613 - RNA, 21 nt, synthetic construct
  source 1..21: mol_type = other RNA
aggtggcgttgtccccttcgg

SEQ ID NO: 1614 - RNA, 21 nt, synthetic construct
  source 1..21: mol_type = other RNA
agtcacgcccgttgggcagtt

SEQ ID NO: 1615 - RNA, 21 nt, synthetic construct
  source 1..21: mol_type = other RNA
agtcctggccgggctggctgc

SEQ ID NO: 1616 - RNA, 21 nt, synthetic construct
  source 1..21: mol_type = other RNA
agtctgagagatggagagagg

SEQ ID NO: 1617 - RNA, 21 nt, synthetic construct
  source 1..21: mol_type = other RNA
agttgtgtgacacggaagcgg

SEQ ID NO: 1618 - RNA, 21 nt, synthetic construct
  source 1..21: mol_type = other RNA
agtttagcacgaagctctccg

SEQ ID NO: 1619 - RNA, 21 nt, synthetic construct
  source 1..21: mol_type = other RNA
atcaaagagagcctgcgggca

SEQ ID NO: 1620 - RNA, 21 nt, synthetic construct
  source 1..21: mol_type = other RNA
atcggagagcttcgtgctaaa

SEQ ID NO: 1621 - RNA, 21 nt, synthetic construct
  source 1..21: mol_type = other RNA
atctccctggcccccaaggcg

SEQ ID NO: 1622 - RNA, 21 nt, synthetic construct
  source 1..21: mol_type = other RNA
atctctcagactccccagaca

SEQ ID NO: 1623 - RNA, 21 nt, synthetic construct
  source 1..21: mol_type = other RNA
atctgcgccttgggggccagg

SEQ ID NO: 1624 - RNA, 21 nt, synthetic construct
  source 1..21: mol_type = other RNA
atgacagcggcacctacctct

SEQ ID NO: 1625 - RNA, 21 nt, synthetic construct
  source 1..21: mol_type = other RNA
atgagccccagcaaccagacg

SEQ ID NO: 1626 - RNA, 21 nt, synthetic construct
  source 1..21: mol_type = other RNA
atgagcgtggtcagggcccgg

SEQ ID NO: 1627 - RNA, 21 nt, synthetic construct
  source 1..21: mol_type = other RNA
atgcggtaccagtttagcacg

SEQ ID NO: 1628 - RNA, 21 nt, synthetic construct
  source 1..21: mol_type = other RNA
atggagagaggtgaggaaggg

SEQ ID NO: 1629 - RNA, 21 nt, synthetic construct
  source 1..21: mol_type = other RNA
atggccccacagaggtaggtg

SEQ ID NO: 1630 - RNA, 21 nt, synthetic construct
  source 1..21: mol_type = other RNA
atgtggaagtcacgcccgttg

SEQ ID NO: 1631 - RNA, 21 nt, synthetic construct
  source 1..21: mol_type = other RNA
atgtgttggagaagctgcagg

SEQ ID NO: 1632 - RNA, 21 nt, synthetic construct
  source 1..21: mol_type = other RNA
attgcgccgggccctgaccac

SEQ ID NO: 1633 - RNA, 21 nt, synthetic construct
  source 1..21: mol_type = other RNA
caaagagagcctgcgggcaga

SEQ ID NO: 1634 - RNA, 21 nt, synthetic construct
  source 1..21: mol_type = other RNA
caacacatcggagagcttcgt

SEQ ID NO: 1635 - RNA, 21 nt, synthetic construct
  source 1..21: mol_type = other RNA
caaccagacggacaagctggc

SEQ ID NO: 1636 - RNA, 21 nt, synthetic construct
  source 1..21: mol_type = other RNA
caacgccaccttcacctgcag

SEQ ID NO: 1637 - RNA, 21 nt, synthetic construct
  source 1..21: mol_type = other RNA
caacgggcgtgacttccacat

SEQ ID NO: 1638 - RNA, 21 nt, synthetic construct
  source 1..21: mol_type = other RNA
caactgcccaacgggcgtgac

SEQ ID NO: 1639 - RNA, 21 nt, synthetic construct
  source 1..21: mol_type = other RNA
caagctggccgccttccccga

SEQ ID NO: 1640 - RNA, 21 nt, synthetic construct
  source 1..21: mol_type = other RNA
caaggcgcagatcaaagagag

SEQ ID NO: 1641 - RNA, 21 nt, synthetic construct
  source 1..21: mol_type = other RNA
caatgacagcggcacctacct

SEQ ID NO: 1642 - RNA, 21 nt, synthetic construct
  source 1..21: mol_type = other RNA
cacaactgcccaacgggcgtg

SEQ ID NO: 1643 - RNA, 21 nt, synthetic construct
  source 1..21: mol_type = other RNA
cacacaactgcccaacgggcg

SEQ ID NO: 1644 - RNA, 21 nt, synthetic construct
  source 1..21: mol_type = other RNA
cacagaggtaggtgccgctgt

SEQ ID NO: 1645 - RNA, 21 nt, synthetic construct
  source 1..21: mol_type = other RNA
cacatcggagagcttcgtgct

SEQ ID NO: 1646 - RNA, 21 nt, synthetic construct
  source 1..21: mol_type = other RNA
cacatgagcgtggtcagggcc

SEQ ID NO: 1647 - RNA, 21 nt, synthetic construct
  source 1..21: mol_type = other RNA
caccacgagcagggctgggga

SEQ ID NO: 1648 - RNA, 21 nt, synthetic construct
  source 1..21: mol_type = other RNA
cacccagccccttcctcacct

SEQ ID NO: 1649 - RNA, 21 nt, synthetic construct
  source 1..21: mol_type = other RNA
caccctgagctctgcccgcag

SEQ ID NO: 1650 - RNA, 21 nt, synthetic construct
  source 1..21: mol_type = other RNA
cacctacctctgtggggccat

SEQ ID NO: 1651 - RNA, 21 nt, synthetic construct
  source 1..21: mol_type = other RNA
cacctctctccatctctcaga

SEQ ID NO: 1652 - RNA, 21 nt, synthetic construct
  source 1..21: mol_type = other RNA
cacctgcagcttctccaacac

SEQ ID NO: 1653 - RNA, 21 nt, synthetic construct
  source 1..21: mol_type = other RNA
cacctgtcaccctgagctctg

SEQ ID NO: 1654 - RNA, 21 nt, synthetic construct
  source 1..21: mol_type = other RNA
caccttcacctgcagcttctc

SEQ ID NO: 1655 - RNA, 21 nt, synthetic construct
  source 1..21: mol_type = other RNA
caccttctccccagccctgct

SEQ ID NO: 1656 - RNA, 21 nt, synthetic construct
  source 1..21: mol_type = other RNA
cacgaagctctccgatgtgtt

SEQ ID NO: 1657 - RNA, 21 nt, synthetic construct
  source 1..21: mol_type = other RNA
cacgagcagggctggggagaa

SEQ ID NO: 1658 - RNA, 21 nt, synthetic construct
  source 1..21: mol_type = other RNA
cacgcccgttgggcagttgtg

SEQ ID NO: 1659 - RNA, 21 nt, synthetic construct
  source 1..21: mol_type = other RNA
cacgctcatgtggaagtcacg

SEQ ID NO: 1660 - RNA, 21 nt, synthetic construct
  source 1..21: mol_type = other RNA
cacggaagcggcagtcctggc

SEQ ID NO: 1661 - RNA, 21 nt, synthetic construct
  source 1..21: mol_type = other RNA
cagacaggccctggaaccccc

SEQ ID NO: 1662 - RNA, 21 nt, synthetic construct
  source 1..21: mol_type = other RNA
cagacggacaagctggccgcc

SEQ ID NO: 1663 - RNA, 21 nt, synthetic construct
  source 1..21: mol_type = other RNA
cagactccccagacaggccct

SEQ ID NO: 1664 - RNA, 21 nt, synthetic construct
  source 1..21: mol_type = other RNA
cagagctcagggtgacaggtg

SEQ ID NO: 1665 - RNA, 21 nt, synthetic construct
  source 1..21: mol_type = other RNA
cagaggtaggtgccgctgtca

SEQ ID NO: 1666 - RNA, 21 nt, synthetic construct
  source 1..21: mol_type = other RNA
cagatcaaagagagcctgcgg

SEQ ID NO: 1667 - RNA, 21 nt, synthetic construct
  source 1..21: mol_type = other RNA
cagcaaccagacggacaagct

SEQ ID NO: 1668 - RNA, 21 nt, synthetic construct
  source 1..21: mol_type = other RNA
cagccagcccggccaggactg

SEQ ID NO: 1669 - RNA, 21 nt, synthetic construct
  source 1..21: mol_type = other RNA
cagccccttcctcacctctct

SEQ ID NO: 1670 - RNA, 21 nt, synthetic construct
  source 1..21: mol_type = other RNA
cagccctgctcgtggtgaccg

SEQ ID NO: 1671 - RNA, 21 nt, synthetic construct
  source 1..21: mol_type = other RNA
cagcggcacctacctctgtgg

SEQ ID NO: 1672 - RNA, 21 nt, synthetic construct
  source 1..21: mol_type = other RNA
cagcttctccaacacatcgga

SEQ ID NO: 1673 - RNA, 21 nt, synthetic construct
  source 1..21: mol_type = other RNA
cagcttgtccgtctggttgct

SEQ ID NO: 1674 - RNA, 21 nt, synthetic construct
  source 1..21: mol_type = other RNA
caggactgccgcttccgtgtc

SEQ ID NO: 1675 - RNA, 21 nt, synthetic construct
  source 1..21: mol_type = other RNA
caggctctctttgatctgcgc

SEQ ID NO: 1676 - RNA, 21 nt, synthetic construct
  source 1..21: mol_type = other RNA
cagggagatggccccacagag

SEQ ID NO: 1677 - RNA, 21 nt, synthetic construct
  source 1..21: mol_type = other RNA
cagggcccggcgcaatgacag

SEQ ID NO: 1678 - RNA, 21 nt, synthetic construct
  source 1..21: mol_type = other RNA
cagggcctgtctggggagtct

SEQ ID NO: 1679 - RNA, 21 nt, synthetic construct
  source 1..21: mol_type = other RNA
cagggctggggagaaggtggg

SEQ ID NO: 1680 - RNA, 21 nt, synthetic construct
  source 1..21: mol_type = other RNA
cagggtgacaggtgcggcctc

SEQ ID NO: 1681 - RNA, 21 nt, synthetic construct
  source 1..21: mol_type = other RNA
caggtgaaggtggcgttgtcc

SEQ ID NO: 1682 - RNA, 21 nt, synthetic construct
  source 1..21: mol_type = other RNA
cagtcctggccgggctggctg

SEQ ID NO: 1683 - RNA, 21 nt, synthetic construct
  source 1..21: mol_type = other RNA
cagttgtgtgacacggaagcg

SEQ ID NO: 1684 - RNA, 21 nt, synthetic construct
  source 1..21: mol_type = other RNA
cagtttagcacgaagctctcc

SEQ ID NO: 1685 - RNA, 21 nt, synthetic construct
  source 1..21: mol_type = other RNA
catcggagagcttcgtgctaa

SEQ ID NO: 1686 - RNA, 21 nt, synthetic construct
  source 1..21: mol_type = other RNA
catctccctggcccccaaggc

SEQ ID NO: 1687 - RNA, 21 nt, synthetic construct
  source 1..21: mol_type = other RNA
catctctcagactccccagac

SEQ ID NO: 1688 - RNA, 21 nt, synthetic construct
  source 1..21: mol_type = other RNA
catgagccccagcaaccagac

SEQ ID NO: 1689 - RNA, 21 nt, synthetic construct
  source 1..21: mol_type = other RNA
catgagcgtggtcagggcccg

SEQ ID NO: 1690 - RNA, 21 nt, synthetic construct
  source 1..21: mol_type = other RNA
catgcggtaccagtttagcac

SEQ ID NO: 1691 - RNA, 21 nt, synthetic construct
  source 1..21: mol_type = other RNA
catgtggaagtcacgcccgtt

SEQ ID NO: 1692 - RNA, 21 nt, synthetic construct
  source 1..21: mol_type = other RNA
cattgcgccgggccctgacca

SEQ ID NO: 1693 - RNA, 21 nt, synthetic construct
  source 1..21: mol_type = other RNA
ccaacacatcggagagcttcg

SEQ ID NO: 1694 - RNA, 21 nt, synthetic construct
  source 1..21: mol_type = other RNA
ccaacgggcgtgacttccaca

SEQ ID NO: 1695 - RNA, 21 nt, synthetic construct
  source 1..21: mol_type = other RNA
ccaaggcgcagatcaaagaga

SEQ ID NO: 1696 - RNA, 21 nt, synthetic construct
  source 1..21: mol_type = other RNA
ccacagaggtaggtgccgctg

SEQ ID NO: 1697 - RNA, 21 nt, synthetic construct
  source 1..21: mol_type = other RNA
ccacatgagcgtggtcagggc

SEQ ID NO: 1698 - RNA, 21 nt, synthetic construct
  source 1..21: mol_type = other RNA
ccacccagccccttcctcacc

SEQ ID NO: 1699 - RNA, 21 nt, synthetic construct
  source 1..21: mol_type = other RNA
ccaccttcacctgcagcttct

SEQ ID NO: 1700 - RNA, 21 nt, synthetic construct
  source 1..21: mol_type = other RNA
ccaccttctccccagccctgc

SEQ ID NO: 1701 - RNA, 21 nt, synthetic construct
  source 1..21: mol_type = other RNA
ccacgagcagggctggggaga

SEQ ID NO: 1702 - RNA, 21 nt, synthetic construct
  source 1..21: mol_type = other RNA
ccacgctcatgtggaagtcac

SEQ ID NO: 1703 - RNA, 21 nt, synthetic construct
  source 1..21: mol_type = other RNA
ccagacaggccctggaacccc

SEQ ID NO: 1704 - RNA, 21 nt, synthetic construct
  source 1..21: mol_type = other RNA
ccagacggacaagctggccgc

SEQ ID NO: 1705 - RNA, 21 nt, synthetic construct
  source 1..21: mol_type = other RNA
ccagcaaccagacggacaagc

SEQ ID NO: 1706 - RNA, 21 nt, synthetic construct
  source 1..21: mol_type = other RNA
ccagccccttcctcacctctc

SEQ ID NO: 1707 - RNA, 21 nt, synthetic construct
  source 1..21: mol_type = other RNA
ccagccctgctcgtggtgacc

SEQ ID NO: 1708 - RNA, 21 nt, synthetic construct
  source 1..21: mol_type = other RNA
ccagcttgtccgtctggttgc

SEQ ID NO: 1709 - RNA, 21 nt, synthetic construct
  source 1..21: mol_type = other RNA
ccaggactgccgcttccgtgt

SEQ ID NO: 1710 - RNA, 21 nt, synthetic construct
  source 1..21: mol_type = other RNA
ccagggagatggccccacaga

SEQ ID NO: 1711 - RNA, 21 nt, synthetic construct
  source 1..21: mol_type = other RNA
ccagggcctgtctggggagtc

SEQ ID NO: 1712 - RNA, 21 nt, synthetic construct
  source 1..21: mol_type = other RNA
ccagtttagcacgaagctctc

SEQ ID NO: 1713 - RNA, 21 nt, synthetic construct
  source 1..21: mol_type = other RNA
ccatctccctggcccccaagg

SEQ ID NO: 1714 - RNA, 21 nt, synthetic construct
  source 1..21: mol_type = other RNA
ccatctctcagactccccaga

SEQ ID NO: 1715 - RNA, 21 nt, synthetic construct
  source 1..21: mol_type = other RNA
cccaacgggcgtgacttccac

SEQ ID NO: 1716 - RNA, 21 nt, synthetic construct
  source 1..21: mol_type = other RNA
cccaaggcgcagatcaaagag

SEQ ID NO: 1717 - RNA, 21 nt, synthetic construct
  source 1..21: mol_type = other RNA
cccacagaggtaggtgccgct

SEQ ID NO: 1718 - RNA, 21 nt, synthetic construct
  source 1..21: mol_type = other RNA
cccaccttctccccagccctg

SEQ ID NO: 1719 - RNA, 21 nt, synthetic construct
  source 1..21: mol_type = other RNA
cccagacaggccctggaaccc

SEQ ID NO: 1720 - RNA, 21 nt, synthetic construct
  source 1..21: mol_type = other RNA
cccagcaaccagacggacaag

SEQ ID NO: 1721 - RNA, 21 nt, synthetic construct
  source 1..21: mol_type = other RNA
cccagccccttcctcacctct

SEQ ID NO: 1722 - RNA, 21 nt, synthetic construct
  source 1..21: mol_type = other RNA
cccagccctgctcgtggtgac

SEQ ID NO: 1723 - RNA, 21 nt, synthetic construct
  source 1..21: mol_type = other RNA
ccccaaggcgcagatcaaaga

SEQ ID NO: 1724 - RNA, 21 nt, synthetic construct
  source 1..21: mol_type = other RNA
ccccacagaggtaggtgccgc

SEQ ID NO: 1725 - RNA, 21 nt, synthetic construct
  source 1..21: mol_type = other RNA
ccccaccttctccccagccct

SEQ ID NO: 1726 - RNA, 21 nt, synthetic construct
  source 1..21: mol_type = other RNA
ccccagacaggccctggaacc

SEQ ID NO: 1727 - RNA, 21 nt, synthetic construct
  source 1..21: mol_type = other RNA
ccccagcaaccagacggacaa

SEQ ID NO: 1728 - RNA, 21 nt, synthetic construct
  source 1..21: mol_type = other RNA
ccccagccctgctcgtggtga

SEQ ID NO: 1729 - RNA, 21 nt, synthetic construct
  source 1..21: mol_type = other RNA
cccccaaggcgcagatcaaag

SEQ ID NO: 1730 - RNA, 21 nt, synthetic construct
  source 1..21: mol_type = other RNA
cccccaccttctccccagccc

SEQ ID NO: 1731 - RNA, 21 nt, synthetic construct
  source 1..21: mol_type = other RNA
ccccccaccttctccccagcc

SEQ ID NO: 1732 - RNA, 21 nt, synthetic construct
  source 1..21: mol_type = other RNA
ccccttcctcacctctctcca

SEQ ID NO: 1733 - RNA, 21 nt, synthetic construct
  source 1..21: mol_type = other RNA
ccccttcggtcaccacgagca

SEQ ID NO: 1734 - RNA, 21 nt, synthetic construct
  source 1..21: mol_type = other RNA
cccgcaggctctctttgatct

SEQ ID NO: 1735 - RNA, 21 nt, synthetic construct
  source 1..21: mol_type = other RNA
cccggccaggactgccgcttc

SEQ ID NO: 1736 - RNA, 21 nt, synthetic construct
  source 1..21: mol_type = other RNA
cccggcgcaatgacagcggca

SEQ ID NO: 1737 - RNA, 21 nt, synthetic construct
  source 1..21: mol_type = other RNA
cccgttgggcagttgtgtgac

SEQ ID NO: 1738 - RNA, 21 nt, synthetic construct
  source 1..21: mol_type = other RNA
ccctgaccacgctcatgtgga

SEQ ID NO: 1739 - RNA, 21 nt, synthetic construct
  source 1..21: mol_type = other RNA
ccctgagctctgcccgcaggc

SEQ ID NO: 1740 - RNA, 21 nt, synthetic construct
  source 1..21: mol_type = other RNA
ccctgctcgtggtgaccgaag

SEQ ID NO: 1741 - RNA, 21 nt, synthetic construct
  source 1..21: mol_type = other RNA
ccctggcccccaaggcgcaga

SEQ ID NO: 1742 - RNA, 21 nt, synthetic construct
  source 1..21: mol_type = other RNA
cccttcctcacctctctccat

SEQ ID NO: 1743 - RNA, 21 nt, synthetic construct
  source 1..21: mol_type = other RNA
cccttcggtcaccacgagcag

SEQ ID NO: 1744 - RNA, 21 nt, synthetic construct
  source 1..21: mol_type = other RNA
ccgaaggggacaacgccacct

SEQ ID NO: 1745 - RNA, 21 nt, synthetic construct
  source 1..21: mol_type = other RNA
ccgaggccgcacctgtcaccc

SEQ ID NO: 1746 - RNA, 21 nt, synthetic construct
  source 1..21: mol_type = other RNA
ccgatgtgttggagaagctgc

SEQ ID NO: 1747 - RNA, 21 nt, synthetic construct
  source 1..21: mol_type = other RNA
ccgcacctgtcaccctgagct

SEQ ID NO: 1748 - RNA, 21 nt, synthetic construct
  source 1..21: mol_type = other RNA
ccgcaggctctctttgatctg

SEQ ID NO: 1749 - RNA, 21 nt, synthetic construct
  source 1..21: mol_type = other RNA
ccgcatgagccccagcaacca

SEQ ID NO: 1750 - RNA, 21 nt, synthetic construct
  source 1..21: mol_type = other RNA
ccgccttccccgaggaccgca

SEQ ID NO: 1751 - RNA, 21 nt, synthetic construct
  source 1..21: mol_type = other RNA
ccgctgtcattgcgccgggcc

SEQ ID NO: 1752 - RNA, 21 nt, synthetic construct
  source 1..21: mol_type = other RNA
ccgcttccgtgtcacacaact

SEQ ID NO: 1753 - RNA, 21 nt, synthetic construct
  source 1..21: mol_type = other RNA
ccggccaggactgccgcttcc

SEQ ID NO: 1754 - RNA, 21 nt, synthetic construct
  source 1..21: mol_type = other RNA
ccggcgcaatgacagcggcac

SEQ ID NO: 1755 - RNA, 21 nt, synthetic construct
  source 1..21: mol_type = other RNA
ccgggccctgaccacgctcat

SEQ ID NO: 1756 - RNA, 21 nt, synthetic construct
  source 1..21: mol_type = other RNA
ccgtctggttgctggggctca

SEQ ID NO: 1757 - RNA, 21 nt, synthetic construct
  source 1..21: mol_type = other RNA
ccgtgtcacacaactgcccaa

SEQ ID NO: 1758 - RNA, 21 nt, synthetic construct
  source 1..21: mol_type = other RNA
ccgttgggcagttgtgtgaca

SEQ ID NO: 1759 - RNA, 21 nt, synthetic construct
  source 1..21: mol_type = other RNA
cctacctctgtggggccatct

SEQ ID NO: 1760 - RNA, 21 nt, synthetic construct
  source 1..21: mol_type = other RNA
cctcacctctctccatctctc

SEQ ID NO: 1761 - RNA, 21 nt, synthetic construct
  source 1..21: mol_type = other RNA
cctccgaggccgcacctgtca

SEQ ID NO: 1762 - RNA, 21 nt, synthetic construct
  source 1..21: mol_type = other RNA
cctcggggaaggcggccagct

SEQ ID NO: 1763 - RNA, 21 nt, synthetic construct
  source 1..21: mol_type = other RNA
cctctctccatctctcagact

SEQ ID NO: 1764 - RNA, 21 nt, synthetic construct
  source 1..21: mol_type = other RNA
cctctgtggggccatctccct

SEQ ID NO: 1765 - RNA, 21 nt, synthetic construct
  source 1..21: mol_type = other RNA
cctgaccacgctcatgtggaa

SEQ ID NO: 1766 - RNA, 21 nt, synthetic construct
  source 1..21: mol_type = other RNA
cctgagctctgcccgcaggct

SEQ ID NO: 1767 - RNA, 21 nt, synthetic construct
  source 1..21: mol_type = other RNA
cctgcagcttctccaacacat

SEQ ID NO: 1768 - RNA, 21 nt, synthetic construct
  source 1..21: mol_type = other RNA
cctgcgggcagagctcagggt

SEQ ID NO: 1769 - RNA, 21 nt, synthetic construct
  source 1..21: mol_type = other RNA
cctgctcgtggtgaccgaagg

SEQ ID NO: 1770 - RNA, 21 nt, synthetic construct
  source 1..21: mol_type = other RNA
cctggcccccaaggcgcagat

SEQ ID NO: 1771 - RNA, 21 nt, synthetic construct
  source 1..21: mol_type = other RNA
cctgtcaccctgagctctgcc

SEQ ID NO: 1772 - RNA, 21 nt, synthetic construct
  source 1..21: mol_type = other RNA
cctgtctggggagtctgagag

SEQ ID NO: 1773 - RNA, 21 nt, synthetic construct
  source 1..21: mol_type = other RNA
ccttcacctgcagcttctcca

SEQ ID NO: 1774 - RNA, 21 nt, synthetic construct
  source 1..21: mol_type = other RNA
ccttccccgaggaccgcagcc

SEQ ID NO: 1775 - RNA, 21 nt, synthetic construct
  source 1..21: mol_type = other RNA
ccttcctcacctctctccatc

SEQ ID NO: 1776 - RNA, 21 nt, synthetic construct
  source 1..21: mol_type = other RNA
ccttcggtcaccacgagcagg

SEQ ID NO: 1777 - RNA, 21 nt, synthetic construct
  source 1..21: mol_type = other RNA
ccttctccccagccctgctcg

SEQ ID NO: 1778 - RNA, 21 nt, synthetic construct
  source 1..21: mol_type = other RNA
ccttgggggccagggagatgg

SEQ ID NO: 1779 - RNA, 21 nt, synthetic construct
  source 1..21: mol_type = other RNA
cgaagctctccgatgtgttgg

SEQ ID NO: 1780 - RNA, 21 nt, synthetic construct
  source 1..21: mol_type = other RNA
cgaaggggacaacgccacctt

SEQ ID NO: 1781 - RNA, 21 nt, synthetic construct
  source 1..21: mol_type = other RNA
cgagcagggctggggagaagg

SEQ ID NO: 1782 - RNA, 21 nt, synthetic construct
  source 1..21: mol_type = other RNA
cgaggccgcacctgtcaccct

SEQ ID NO: 1783 - RNA, 21 nt, synthetic construct
  source 1..21: mol_type = other RNA
cgatgtgttggagaagctgca

SEQ ID NO: 1784 - RNA, 21 nt, synthetic construct
  source 1..21: mol_type = other RNA
cgcaatgacagcggcacctac

SEQ ID NO: 1785 - RNA, 21 nt, synthetic construct
  source 1..21: mol_type = other RNA
cgcacctgtcaccctgagctc

SEQ ID NO: 1786 - RNA, 21 nt, synthetic construct
  source 1..21: mol_type = other RNA
cgcagatcaaagagagcctgc

SEQ ID NO: 1787 - RNA, 21 nt, synthetic construct
  source 1..21: mol_type = other RNA
cgcaggctctctttgatctgc

SEQ ID NO: 1788 - RNA, 21 nt, synthetic construct
  source 1..21: mol_type = other RNA
cgcatgagccccagcaaccag

SEQ ID NO: 1789 - RNA, 21 nt, synthetic construct
  source 1..21: mol_type = other RNA
cgccaccttcacctgcagctt

SEQ ID NO: 1790 - RNA, 21 nt, synthetic construct
  source 1..21: mol_type = other RNA
cgcccgttgggcagttgtgtg

SEQ ID NO: 1791 - RNA, 21 nt, synthetic construct
  source 1..21: mol_type = other RNA
cgccttccccgaggaccgcag

SEQ ID NO: 1792 - RNA, 21 nt, synthetic construct
  source 1..21: mol_type = other RNA
cgccttgggggccagggagat

SEQ ID NO: 1793 - RNA, 21 nt, synthetic construct
  source 1..21: mol_type = other RNA
cgctcatgtggaagtcacgcc

SEQ ID NO: 1794 - RNA, 21 nt, synthetic construct
  source 1..21: mol_type = other RNA
cgctgtcattgcgccgggccc

SEQ ID NO: 1795 - RNA, 21 nt, synthetic construct
  source 1..21: mol_type = other RNA
cgcttccgtgtcacacaactg

SEQ ID NO: 1796 - RNA, 21 nt, synthetic construct
  source 1..21: mol_type = other RNA
cggaagcggcagtcctggccg

SEQ ID NO: 1797 - RNA, 21 nt, synthetic construct
  source 1..21: mol_type = other RNA
cggacaagctggccgccttcc

SEQ ID NO: 1798 - RNA, 21 nt, synthetic construct
  source 1..21: mol_type = other RNA
cggagagcttcgtgctaaact

SEQ ID NO: 1799 - RNA, 21 nt, synthetic construct
  source 1..21: mol_type = other RNA
cggcacctacctctgtggggc

SEQ ID NO: 1800 - RNA, 21 nt, synthetic construct
  source 1..21: mol_type = other RNA
cggccagcttgtccgtctggt

SEQ ID NO: 1801 - RNA, 21 nt, synthetic construct
  source 1..21: mol_type = other RNA
cggccaggactgccgcttccg

SEQ ID NO: 1802 - RNA, 21 nt, synthetic construct
  source 1..21: mol_type = other RNA
cggcgcaatgacagcggcacc

SEQ ID NO: 1803 - RNA, 21 nt, synthetic construct
  source 1..21: mol_type = other RNA
cgggcagagctcagggtgaca

SEQ ID NO: 1804 - RNA, 21 nt, synthetic construct
  source 1..21: mol_type = other RNA
cgggccctgaccacgctcatg

SEQ ID NO: 1805 - RNA, 21 nt, synthetic construct
  source 1..21: mol_type = other RNA
cgggcgtgacttccacatgag

SEQ ID NO: 1806 - RNA, 21 nt, synthetic construct
  source 1..21: mol_type = other RNA
cggggaaggcggccagcttgt

SEQ ID NO: 1807 - RNA, 21 nt, synthetic construct
  source 1..21: mol_type = other RNA
cggtaccagtttagcacgaag

SEQ ID NO: 1808 - RNA, 21 nt, synthetic construct
  source 1..21: mol_type = other RNA
cggtcaccacgagcagggctg

SEQ ID NO: 1809 - RNA, 21 nt, synthetic construct
  source 1..21: mol_type = other RNA
cgtctggttgctggggctcat

SEQ ID NO: 1810 - RNA, 21 nt, synthetic construct
  source 1..21: mol_type = other RNA
cgtgacttccacatgagcgtg

SEQ ID NO: 1811 - RNA, 21 nt, synthetic construct
  source 1..21: mol_type = other RNA
cgtgctaaactggtaccgcat

SEQ ID NO: 1812 - RNA, 21 nt, synthetic construct
  source 1..21: mol_type = other RNA
cgtggtcagggcccggcgcaa

SEQ ID NO: 1813 - RNA, 21 nt, synthetic construct
  source 1..21: mol_type = other RNA
cgtggtgaccgaaggggacaa

SEQ ID NO: 1814 - RNA, 21 nt, synthetic construct
  source 1..21: mol_type = other RNA
cgtgtcacacaactgcccaac

SEQ ID NO: 1815 - RNA, 21 nt, synthetic construct
  source 1..21: mol_type = other RNA
cgttgggcagttgtgtgacac

SEQ ID NO: 1816 - RNA, 21 nt, synthetic construct
  source 1..21: mol_type = other RNA
cgttgtccccttcggtcacca

SEQ ID NO: 1817 - RNA, 21 nt, synthetic construct
  source 1..21: mol_type = other RNA
ctaaactggtaccgcatgagc

SEQ ID NO: 1818 - RNA, 21 nt, synthetic construct
  source 1..21: mol_type = other RNA
ctacctctgtggggccatctc

SEQ ID NO: 1819 - RNA, 21 nt, synthetic construct
  source 1..21: mol_type = other RNA
ctcacctctctccatctctca

SEQ ID NO: 1820 - RNA, 21 nt, synthetic construct
  source 1..21: mol_type = other RNA
ctcagactccccagacaggcc

SEQ ID NO: 1821 - RNA, 21 nt, synthetic construct
  source 1..21: mol_type = other RNA
ctcagctcacccctgccccgg

SEQ ID NO: 1822 - RNA, 21 nt, synthetic construct
  source 1..21: mol_type = other RNA
ctcagggtgacaggtgcggcc

SEQ ID NO: 1823 - RNA, 21 nt, synthetic construct
  source 1..21: mol_type = other RNA
ctcatgcggtaccagtttagc

SEQ ID NO: 1824 - RNA, 21 nt, synthetic construct
  source 1..21: mol_type = other RNA
ctcatgtggaagtcacgcccg

SEQ ID NO: 1825 - RNA, 21 nt, synthetic construct
  source 1..21: mol_type = other RNA
ctccaacacatcggagagctt

SEQ ID NO: 1826 - RNA, 21 nt, synthetic construct
  source 1..21: mol_type = other RNA
ctccatctctcagactcccca

SEQ ID NO: 1827 - RNA, 21 nt, synthetic construct
  source 1..21: mol_type = other RNA
ctccccagacaggccctggaa

SEQ ID NO: 1828 - RNA, 21 nt, synthetic construct
  source 1..21: mol_type = other RNA
ctccccagccctgctcgtggt

SEQ ID NO: 1829 - RNA, 21 nt, synthetic construct
  source 1..21: mol_type = other RNA
ctccctggcccccaaggcgca

SEQ ID NO: 1830 - RNA, 21 nt, synthetic construct
  source 1..21: mol_type = other RNA
ctccgaggccgcacctgtcac

SEQ ID NO: 1831 - RNA, 21 nt, synthetic construct
  source 1..21: mol_type = other RNA
ctccgatgtgttggagaagct

SEQ ID NO: 1832 - RNA, 21 nt, synthetic construct
  source 1..21: mol_type = other RNA
ctcggggaaggcggccagctt

SEQ ID NO: 1833 - RNA, 21 nt, synthetic construct
  source 1..21: mol_type = other RNA
ctcgtggtgaccgaaggggac

SEQ ID NO: 1834 - RNA, 21 nt, synthetic construct
  source 1..21: mol_type = other RNA
ctctcagactccccagacagg

SEQ ID NO: 1835 - RNA, 21 nt, synthetic construct
  source 1..21: mol_type = other RNA
ctctccatctctcagactccc

SEQ ID NO: 1836 - RNA, 21 nt, synthetic construct
  source 1..21: mol_type = other RNA
ctctccgatgtgttggagaag

SEQ ID NO: 1837 - RNA, 21 nt, synthetic construct
  source 1..21: mol_type = other RNA
ctctctccatctctcagactc

SEQ ID NO: 1838 - RNA, 21 nt, synthetic construct
  source 1..21: mol_type = other RNA
ctctctttgatctgcgccttg

SEQ ID NO: 1839 - RNA, 21 nt, synthetic construct
  source 1..21: mol_type = other RNA
ctctgcccgcaggctctcttt

SEQ ID NO: 1840 - RNA, 21 nt, synthetic construct
  source 1..21: mol_type = other RNA
ctctgtggggccatctccctg

SEQ ID NO: 1841 - RNA, 21 nt, synthetic construct
  source 1..21: mol_type = other RNA
ctctttgatctgcgccttggg

SEQ ID NO: 1842 - RNA, 21 nt, synthetic construct
  source 1..21: mol_type = other RNA
ctgaccacgctcatgtggaag

SEQ ID NO: 1843 - RNA, 21 nt, synthetic construct
  source 1..21: mol_type = other RNA
ctgagagatggagagaggtga

SEQ ID NO: 1844 - RNA, 21 nt, synthetic construct
  source 1..21: mol_type = other RNA
ctgagctctgcccgcaggctc

SEQ ID NO: 1845 - RNA, 21 nt, synthetic construct
  source 1..21: mol_type = other RNA
ctgcagcttctccaacacatc

SEQ ID NO: 1846 - RNA, 21 nt, synthetic construct
  source 1..21: mol_type = other RNA
ctgcaggtgaaggtggcgttg

SEQ ID NO: 1847 - RNA, 21 nt, synthetic construct
  source 1..21: mol_type = other RNA
ctgcccaacgggcgtgacttc

SEQ ID NO: 1848 - RNA, 21 nt, synthetic construct
  source 1..21: mol_type = other RNA
ctgcccgcaggctctctttga

SEQ ID NO: 1849 - RNA, 21 nt, synthetic construct
  source 1..21: mol_type = other RNA
ctgccgcttccgtgtcacaca

SEQ ID NO: 1850 - RNA, 21 nt, synthetic construct
  source 1..21: mol_type = other RNA
ctgcgccttgggggccaggga

SEQ ID NO: 1851 - RNA, 21 nt, synthetic construct
  source 1..21: mol_type = other RNA
ctgcgggcagagctcagggtg

SEQ ID NO: 1852 - RNA, 21 nt, synthetic construct
  source 1..21: mol_type = other RNA
ctgcggtcctcggggaaggcg

SEQ ID NO: 1853 - RNA, 21 nt, synthetic construct
  source 1..21: mol_type = other RNA
ctgctcgtggtgaccgaaggg

SEQ ID NO: 1854 - RNA, 21 nt, synthetic construct
  source 1..21: mol_type = other RNA
ctggcccccaaggcgcagatc

SEQ ID NO: 1855 - RNA, 21 nt, synthetic construct
  source 1..21: mol_type = other RNA
ctggccgccttccccgaggac

SEQ ID NO: 1856 - RNA, 21 nt, synthetic construct
  source 1..21: mol_type = other RNA
ctggctgcggtcctcggggaa

SEQ ID NO: 1857 - RNA, 21 nt, synthetic construct
  source 1..21: mol_type = other RNA
ctggggagtctgagagatgga

SEQ ID NO: 1858 - RNA, 21 nt, synthetic construct
  source 1..21: mol_type = other RNA
ctggggctcatgcggtaccag

SEQ ID NO: 1859 - RNA, 21 nt, synthetic construct
  source 1..21: mol_type = other RNA
ctggtaccgcatgagccccag

SEQ ID NO: 1860 - RNA, 21 nt, synthetic construct
  source 1..21: mol_type = other RNA
ctggttgctggggctcatgcg

SEQ ID NO: 1861 - RNA, 21 nt, synthetic construct
  source 1..21: mol_type = other RNA
ctgtcaccctgagctctgccc

SEQ ID NO: 1862 - RNA, 21 nt, synthetic construct
  source 1..21: mol_type = other RNA
ctgtcattgcgccgggccctg

SEQ ID NO: 1863 - RNA, 21 nt, synthetic construct
  source 1..21: mol_type = other RNA
ctgtctggggagtctgagaga

SEQ ID NO: 1864 - RNA, 21 nt, synthetic construct
  source 1..21: mol_type = other RNA
ctgtggggccatctccctggc

SEQ ID NO: 1865 - RNA, 21 nt, synthetic construct
  source 1..21: mol_type = other RNA
cttcacctgcagcttctccaa

SEQ ID NO: 1866 - RNA, 21 nt, synthetic construct
  source 1..21: mol_type = other RNA
cttccacatgagcgtggtcag

SEQ ID NO: 1867 - RNA, 21 nt, synthetic construct
  source 1..21: mol_type = other RNA
cttccccgaggaccgcagcca

SEQ ID NO: 1868 - RNA, 21 nt, synthetic construct
  source 1..21: mol_type = other RNA
cttccgtgtcacacaactgcc

SEQ ID NO: 1869 - RNA, 21 nt, synthetic construct
  source 1..21: mol_type = other RNA
cttcctcacctctctccatct

SEQ ID NO: 1870 - RNA, 21 nt, synthetic construct
  source 1..21: mol_type = other RNA
cttcggtcaccacgagcaggg

SEQ ID NO: 1871 - RNA, 21 nt, synthetic construct
  source 1..21: mol_type = other RNA
cttcgtgctaaactggtaccg

SEQ ID NO: 1872 - RNA, 21 nt, synthetic construct
  source 1..21: mol_type = other RNA
cttctccaacacatcggagag

SEQ ID NO: 1873 - RNA, 21 nt, synthetic construct
  source 1..21: mol_type = other RNA
cttctccccagccctgctcgt

SEQ ID NO: 1874 - RNA, 21 nt, synthetic construct
  source 1..21: mol_type = other RNA
cttgggggccagggagatggc

SEQ ID NO: 1875 - RNA, 21 nt, synthetic construct
  source 1..21: mol_type = other RNA
cttgtccgtctggttgctggg

SEQ ID NO: 1876 - RNA, 21 nt, synthetic construct
  source 1..21: mol_type = other RNA
ctttgatctgcgccttggggg

SEQ ID NO: 1877 - RNA, 21 nt, synthetic construct
  source 1..21: mol_type = other RNA
gaagcggcagtcctggccggg

SEQ ID NO: 1878 - RNA, 21 nt, synthetic construct
  source 1..21: mol_type = other RNA
gaagctctccgatgtgttgga

SEQ ID NO: 1879 - RNA, 21 nt, synthetic construct
  source 1..21: mol_type = other RNA
gaagctgcaggtgaaggtggc

SEQ ID NO: 1880 - RNA, 21 nt, synthetic construct
  source 1..21: mol_type = other RNA
gaaggcggccagcttgtccgt

SEQ ID NO: 1881 - RNA, 21 nt, synthetic construct
  source 1..21: mol_type = other RNA
gaaggggacaacgccaccttc

SEQ ID NO: 1882 - RNA, 21 nt, synthetic construct
  source 1..21: mol_type = other RNA
gaaggtggcgttgtccccttc

SEQ ID NO: 1883 - RNA, 21 nt, synthetic construct
  source 1..21: mol_type = other RNA
gaagtcacgcccgttgggcag

SEQ ID NO: 1884 - RNA, 21 nt, synthetic construct
  source 1..21: mol_type = other RNA
gacaacgccaccttcacctgc

SEQ ID NO: 1885 - RNA, 21 nt, synthetic construct
  source 1..21: mol_type = other RNA
gacaagctggccgccttcccc

SEQ ID NO: 1886 - RNA, 21 nt, synthetic construct
  source 1..21: mol_type = other RNA
gacacggaagcggcagtcctg

SEQ ID NO: 1887 - RNA, 21 nt, synthetic construct
  source 1..21: mol_type = other RNA
gacagcggcacctacctctgt

SEQ ID NO: 1888 - RNA, 21 nt, synthetic construct
  source 1..21: mol_type = other RNA
gacaggtgcggcctcggaggc

SEQ ID NO: 1889 - RNA, 21 nt, synthetic construct
  source 1..21: mol_type = other RNA
gaccacgctcatgtggaagtc

SEQ ID NO: 1890 - RNA, 21 nt, synthetic construct
  source 1..21: mol_type = other RNA
gaccgaaggggacaacgccac

SEQ ID NO: 1891 - RNA, 21 nt, synthetic construct
  source 1..21: mol_type = other RNA
gacggacaagctggccgcctt

SEQ ID NO: 1892 - RNA, 21 nt, synthetic construct
  source 1..21: mol_type = other RNA
gactccccagacaggccctgg

SEQ ID NO: 1893 - RNA, 21 nt, synthetic construct
  source 1..21: mol_type = other RNA
gactgccgcttccgtgtcaca

SEQ ID NO: 1894 - RNA, 21 nt, synthetic construct
  source 1..21: mol_type = other RNA
gacttccacatgagcgtggtc

SEQ ID NO: 1895 - RNA, 21 nt, synthetic construct
  source 1..21: mol_type = other RNA
gagaagctgcaggtgaaggtg

SEQ ID NO: 1896 - RNA, 21 nt, synthetic construct
  source 1..21: mol_type = other RNA
gagagatggagagaggtgagg

SEQ ID NO: 1897 - RNA, 21 nt, synthetic construct
  source 1..21: mol_type = other RNA
gagagcctgcgggcagagctc

SEQ ID NO: 1898 - RNA, 21 nt, synthetic construct
  source 1..21: mol_type = other RNA
gagagcttcgtgctaaactgg

SEQ ID NO: 1899 - RNA, 21 nt, synthetic construct
  source 1..21: mol_type = other RNA
gagatggagagaggtgaggaa

SEQ ID NO: 1900 - RNA, 21 nt, synthetic construct
  source 1..21: mol_type = other RNA
gagatggccccacagaggtag

SEQ ID NO: 1901 - RNA, 21 nt, synthetic construct
  source 1..21: mol_type = other RNA
gagcagggctggggagaaggt

SEQ ID NO: 1902 - RNA, 21 nt, synthetic construct
  source 1..21: mol_type = other RNA
gagccccagcaaccagacgga

SEQ ID NO: 1903 - RNA, 21 nt, synthetic construct
  source 1..21: mol_type = other RNA
gagcctgcgggcagagctcag

SEQ ID NO: 1904 - RNA, 21 nt, synthetic construct
  source 1..21: mol_type = other RNA
gagctcagggtgacaggtgcg

SEQ ID NO: 1905 - RNA, 21 nt, synthetic construct
  source 1..21: mol_type = other RNA
gagctctgcccgcaggctctc

SEQ ID NO: 1906 - RNA, 21 nt, synthetic construct
  source 1..21: mol_type = other RNA
gagcttcgtgctaaactggta

SEQ ID NO: 1907 - RNA, 21 nt, synthetic construct
  source 1..21: mol_type = other RNA
gaggccgcacctgtcaccctg

SEQ ID NO: 1908 - RNA, 21 nt, synthetic construct
  source 1..21: mol_type = other RNA
gaggtaggtgccgctgtcatt

SEQ ID NO: 1909 - RNA, 21 nt, synthetic construct
  source 1..21: mol_type = other RNA
gagtctgagagatggagagag

SEQ ID NO: 1910 - RNA, 21 nt, synthetic construct
  source 1..21: mol_type = other RNA
gatcaaagagagcctgcgggc

SEQ ID NO: 1911 - RNA, 21 nt, synthetic construct
  source 1..21: mol_type = other RNA
gatctgcgccttgggggccag

SEQ ID NO: 1912 - RNA, 21 nt, synthetic construct
  source 1..21: mol_type = other RNA
gatggagagaggtgaggaagg

SEQ ID NO: 1913 - RNA, 21 nt, synthetic construct
  source 1..21: mol_type = other RNA
gatggccccacagaggtaggt

SEQ ID NO: 1914 - RNA, 21 nt, synthetic construct
  source 1..21: mol_type = other RNA
gatgtgttggagaagctgcag

SEQ ID NO: 1915 - RNA, 21 nt, synthetic construct
  source 1..21: mol_type = other RNA
gcaaccagacggacaagctgg

SEQ ID NO: 1916 - RNA, 21 nt, synthetic construct
  source 1..21: mol_type = other RNA
gcaatgacagcggcacctacc

SEQ ID NO: 1917 - RNA, 21 nt, synthetic construct
  source 1..21: mol_type = other RNA
gcacctacctctgtggggcca

SEQ ID NO: 1918 - RNA, 21 nt, synthetic construct
  source 1..21: mol_type = other RNA
gcacctgtcaccctgagctct

SEQ ID NO: 1919 - RNA, 21 nt, synthetic construct
  source 1..21: mol_type = other RNA
gcacgaagctctccgatgtgt

SEQ ID NO: 1920 - RNA, 21 nt, synthetic construct
  source 1..21: mol_type = other RNA
gcagagctcagggtgacaggt

SEQ ID NO: 1921 - RNA, 21 nt, synthetic construct
  source 1..21: mol_type = other RNA
gcagatcaaagagagcctgcg

SEQ ID NO: 1922 - RNA, 21 nt, synthetic construct
  source 1..21: mol_type = other RNA
gcagccagcccggccaggact

SEQ ID NO: 1923 - RNA, 21 nt, synthetic construct
  source 1..21: mol_type = other RNA
gcagcttctccaacacatcgg

SEQ ID NO: 1924 - RNA, 21 nt, synthetic construct
  source 1..21: mol_type = other RNA
gcaggctctctttgatctgcg

SEQ ID NO: 1925 - RNA, 21 nt, synthetic construct
  source 1..21: mol_type = other RNA
gcagggctggggagaaggtgg

SEQ ID NO: 1926 - RNA, 21 nt, synthetic construct
  source 1..21: mol_type = other RNA
gcaggtgaaggtggcgttgtc

SEQ ID NO: 1927 - RNA, 21 nt, synthetic construct
  source 1..21: mol_type = other RNA
gcagtcctggccgggctggct

SEQ ID NO: 1928 - RNA, 21 nt, synthetic construct
  source 1..21: mol_type = other RNA
gcagttgtgtgacacggaagc

SEQ ID NO: 1929 - RNA, 21 nt, synthetic construct
  source 1..21: mol_type = other RNA
gcatgagccccagcaaccaga

SEQ ID NO: 1930 - RNA, 21 nt, synthetic construct
  source 1..21: mol_type = other RNA
gccacccagccccttcctcac

SEQ ID NO: 1931 - RNA, 21 nt, synthetic construct
  source 1..21: mol_type = other RNA
gccaccttcacctgcagcttc

SEQ ID NO: 1932 - RNA, 21 nt, synthetic construct
  source 1..21: mol_type = other RNA
gccagcttgtccgtctggttg

SEQ ID NO: 1933 - RNA, 21 nt, synthetic construct
  source 1..21: mol_type = other RNA
gccaggactgccgcttccgtg

SEQ ID NO: 1934 - RNA, 21 nt, synthetic construct
  source 1..21: mol_type = other RNA
gccagggagatggccccacag

SEQ ID NO: 1935 - RNA, 21 nt, synthetic construct
  source 1..21: mol_type = other RNA
gccatctccctggcccccaag

SEQ ID NO: 1936 - RNA, 21 nt, synthetic construct
  source 1..21: mol_type = other RNA
gcccaacgggcgtgacttcca

SEQ ID NO: 1937 - RNA, 21 nt, synthetic construct
  source 1..21: mol_type = other RNA
gccccacagaggtaggtgccg

SEQ ID NO: 1938 - RNA, 21 nt, synthetic construct
  source 1..21: mol_type = other RNA
gccccagcaaccagacggaca

SEQ ID NO: 1939 - RNA, 21 nt, synthetic construct
  source 1..21: mol_type = other RNA
gcccccaaggcgcagatcaaa

SEQ ID NO: 1940 - RNA, 21 nt, synthetic construct
  source 1..21: mol_type = other RNA
gccccttcctcacctctctcc

SEQ ID NO: 1941 - RNA, 21 nt, synthetic construct
  source 1..21: mol_type = other RNA
gcccgcaggctctctttgatc

SEQ ID NO: 1942 - RNA, 21 nt, synthetic construct
  source 1..21: mol_type = other RNA
gcccggccaggactgccgctt

SEQ ID NO: 1943 - RNA, 21 nt, synthetic construct
  source 1..21: mol_type = other RNA
gcccggcgcaatgacagcggc

SEQ ID NO: 1944 - RNA, 21 nt, synthetic construct
  source 1..21: mol_type = other RNA
gcccgttgggcagttgtgtga

SEQ ID NO: 1945 - RNA, 21 nt, synthetic construct
  source 1..21: mol_type = other RNA
gccctgaccacgctcatgtgg

SEQ ID NO: 1946 - RNA, 21 nt, synthetic construct
  source 1..21: mol_type = other RNA
gccctgctcgtggtgaccgaa

SEQ ID NO: 1947 - RNA, 21 nt, synthetic construct
  source 1..21: mol_type = other RNA
gccgcacctgtcaccctgagc

SEQ ID NO: 1948 - RNA, 21 nt, synthetic construct
  source 1..21: mol_type = other RNA
gccgctgtcattgcgccgggc

SEQ ID NO: 1949 - RNA, 21 nt, synthetic construct
  source 1..21: mol_type = other RNA
gccgcttccgtgtcacacaac

SEQ ID NO: 1950 - RNA, 21 nt, synthetic construct
  source 1..21: mol_type = other RNA
gccgggccctgaccacgctca

SEQ ID NO: 1951 - RNA, 21 nt, synthetic construct
  source 1..21: mol_type = other RNA
gcctccgaggccgcacctgtc

SEQ ID NO: 1952 - RNA, 21 nt, synthetic construct
  source 1..21: mol_type = other RNA
gcctgcgggcagagctcaggg

SEQ ID NO: 1953 - RNA, 21 nt, synthetic construct
  source 1..21: mol_type = other RNA
gcctgtctggggagtctgaga

SEQ ID NO: 1954 - RNA, 21 nt, synthetic construct
  source 1..21: mol_type = other RNA
gccttccccgaggaccgcagc

SEQ ID NO: 1955 - RNA, 21 nt, synthetic construct
  source 1..21: mol_type = other RNA
gccttgggggccagggagatg

SEQ ID NO: 1956 - RNA, 21 nt, synthetic construct
  source 1..21: mol_type = other RNA
gcgcaatgacagcggcaccta

SEQ ID NO: 1957 - RNA, 21 nt, synthetic construct
  source 1..21: mol_type = other RNA
gcgcagatcaaagagagcctg

SEQ ID NO: 1958 - RNA, 21 nt, synthetic construct
  source 1..21: mol_type = other RNA
gcgccttgggggccagggaga

SEQ ID NO: 1959 - RNA, 21 nt, synthetic construct
  source 1..21: mol_type = other RNA
gcggcacctacctctgtgggg

SEQ ID NO: 1960 - RNA, 21 nt, synthetic construct
  source 1..21: mol_type = other RNA
gcggccagcttgtccgtctgg

SEQ ID NO: 1961 - RNA, 21 nt, synthetic construct
  source 1..21: mol_type = other RNA
gcgggcagagctcagggtgac

SEQ ID NO: 1962 - RNA, 21 nt, synthetic construct
  source 1..21: mol_type = other RNA
gcggtaccagtttagcacgaa

SEQ ID NO: 1963 - RNA, 21 nt, synthetic construct
  source 1..21: mol_type = other RNA
gcgtgacttccacatgagcgt

SEQ ID NO: 1964 - RNA, 21 nt, synthetic construct
  source 1..21: mol_type = other RNA
gcgttgtccccttcggtcacc

SEQ ID NO: 1965 - RNA, 21 nt, synthetic construct
  source 1..21: mol_type = other RNA
gctaaactggtaccgcatgag

SEQ ID NO: 1966 - RNA, 21 nt, synthetic construct
  source 1..21: mol_type = other RNA
gctcagctcacccctgccccg

SEQ ID NO: 1967 - RNA, 21 nt, synthetic construct
  source 1..21: mol_type = other RNA
gctcagggtgacaggtgcggc

SEQ ID NO: 1968 - RNA, 21 nt, synthetic construct
  source 1..21: mol_type = other RNA
gctcatgcggtaccagtttag

SEQ ID NO: 1969 - RNA, 21 nt, synthetic construct
  source 1..21: mol_type = other RNA
gctcatgtggaagtcacgccc

SEQ ID NO: 1970 - RNA, 21 nt, synthetic construct
  source 1..21: mol_type = other RNA
gctcgtggtgaccgaagggga

SEQ ID NO: 1971 - RNA, 21 nt, synthetic construct
  source 1..21: mol_type = other RNA
gctctccgatgtgttggagaa

SEQ ID NO: 1972 - RNA, 21 nt, synthetic construct
  source 1..21: mol_type = other RNA
gctctctttgatctgcgcctt

SEQ ID NO: 1973 - RNA, 21 nt, synthetic construct
  source 1..21: mol_type = other RNA
gctctgcccgcaggctctctt

SEQ ID NO: 1974 - RNA, 21 nt, synthetic construct
  source 1..21: mol_type = other RNA
gctgcaggtgaaggtggcgtt

SEQ ID NO: 1975 - RNA, 21 nt, synthetic construct
  source 1..21: mol_type = other RNA
gctgcggtcctcggggaaggc

SEQ ID NO: 1976 - RNA, 21 nt, synthetic construct
  source 1..21: mol_type = other RNA
gctggccgccttccccgagga

SEQ ID NO: 1977 - RNA, 21 nt, synthetic construct
  source 1..21: mol_type = other RNA
gctggctgcggtcctcgggga

SEQ ID NO: 1978 - RNA, 21 nt, synthetic construct
  source 1..21: mol_type = other RNA
gctggggctcatgcggtacca

SEQ ID NO: 1979 - RNA, 21 nt, synthetic construct
  source 1..21: mol_type = other RNA
gctgtcattgcgccgggccct

SEQ ID NO: 1980 - RNA, 21 nt, synthetic construct
  source 1..21: mol_type = other RNA
gcttccgtgtcacacaactgc

SEQ ID NO: 1981 - RNA, 21 nt, synthetic construct
  source 1..21: mol_type = other RNA
gcttcgtgctaaactggtacc

SEQ ID NO: 1982 - RNA, 21 nt, synthetic construct
  source 1..21: mol_type = other RNA
gcttctccaacacatcggaga

SEQ ID NO: 1983 - RNA, 21 nt, synthetic construct
  source 1..21: mol_type = other RNA
gcttgtccgtctggttgctgg

SEQ ID NO: 1984 - RNA, 21 nt, synthetic construct
  source 1..21: mol_type = other RNA
ggaagcggcagtcctggccgg

SEQ ID NO: 1985 - RNA, 21 nt, synthetic construct
  source 1..21: mol_type = other RNA
ggaaggcggccagcttgtccg

SEQ ID NO: 1986 - RNA, 21 nt, synthetic construct
  source 1..21: mol_type = other RNA
ggaagtcacgcccgttgggca

SEQ ID NO: 1987 - RNA, 21 nt, synthetic construct
  source 1..21: mol_type = other RNA
ggacaacgccaccttcacctg

SEQ ID NO: 1988 - RNA, 21 nt, synthetic construct
  source 1..21: mol_type = other RNA
ggacaagctggccgccttccc

SEQ ID NO: 1989 - RNA, 21 nt, synthetic construct
  source 1..21: mol_type = other RNA
ggactgccgcttccgtgtcac

SEQ ID NO: 1990 - RNA, 21 nt, synthetic construct
  source 1..21: mol_type = other RNA
ggagaagctgcaggtgaaggt

SEQ ID NO: 1991 - RNA, 21 nt, synthetic construct
  source 1..21: mol_type = other RNA
ggagagaggtgaggaaggggc

SEQ ID NO: 1992 - RNA, 21 nt, synthetic construct
  source 1..21: mol_type = other RNA
ggagagcttcgtgctaaactg

SEQ ID NO: 1993 - RNA, 21 nt, synthetic construct
  source 1..21: mol_type = other RNA
ggagatggccccacagaggta

SEQ ID NO: 1994 - RNA, 21 nt, synthetic construct
  source 1..21: mol_type = other RNA
ggagtctgagagatggagaga

SEQ ID NO: 1995 - RNA, 21 nt, synthetic construct
  source 1..21: mol_type = other RNA
ggcacctacctctgtggggcc

SEQ ID NO: 1996 - RNA, 21 nt, synthetic construct
  source 1..21: mol_type = other RNA
ggcagagctcagggtgacagg

SEQ ID NO: 1997 - RNA, 21 nt, synthetic construct
  source 1..21: mol_type = other RNA
ggcagttgtgtgacacggaag

SEQ ID NO: 1998 - RNA, 21 nt, synthetic construct
  source 1..21: mol_type = other RNA
ggccagcttgtccgtctggtt

SEQ ID NO: 1999 - RNA, 21 nt, synthetic construct
  source 1..21: mol_type = other RNA
ggccaggactgccgcttccgt

SEQ ID NO: 2000 - RNA, 21 nt, synthetic construct
  source 1..21: mol_type = other RNA
ggccagggagatggccccaca

SEQ ID NO: 2001 - RNA, 21 nt, synthetic construct
  source 1..21: mol_type = other RNA
ggccatctccctggcccccaa

SEQ ID NO: 2002 - RNA, 21 nt, synthetic construct
  source 1..21: mol_type = other RNA
ggccccacagaggtaggtgcc

SEQ ID NO: 2003 - RNA, 21 nt, synthetic construct
  source 1..21: mol_type = other RNA
ggcccccaaggcgcagatcaa

SEQ ID NO: 2004 - RNA, 21 nt, synthetic construct
  source 1..21: mol_type = other RNA
ggcccggcgcaatgacagcgg

SEQ ID NO: 2005 - RNA, 21 nt, synthetic construct
  source 1..21: mol_type = other RNA
ggccctgaccacgctcatgtg

SEQ ID NO: 2006 - RNA, 21 nt, synthetic construct
  source 1..21: mol_type = other RNA
ggccgcacctgtcaccctgag

SEQ ID NO: 2007 - RNA, 21 nt, synthetic construct
  source 1..21: mol_type = other RNA
ggcctccgaggccgcacctgt

SEQ ID NO: 2008 - RNA, 21 nt, synthetic construct
  source 1..21: mol_type = other RNA
ggcctgtctggggagtctgag

SEQ ID NO: 2009 - RNA, 21 nt, synthetic construct
  source 1..21: mol_type = other RNA
ggcgcaatgacagcggcacct

SEQ ID NO: 2010 - RNA, 21 nt, synthetic construct
  source 1..21: mol_type = other RNA
ggcgcagatcaaagagagcct

SEQ ID NO: 2011 - RNA, 21 nt, synthetic construct
  source 1..21: mol_type = other RNA
ggcggccagcttgtccgtctg

SEQ ID NO: 2012 - RNA, 21 nt, synthetic construct
  source 1..21: mol_type = other RNA
ggcgtgacttccacatgagcg

SEQ ID NO: 2013 - RNA, 21 nt, synthetic construct
  source 1..21: mol_type = other RNA
ggcgttgtccccttcggtcac

SEQ ID NO: 2014 - RNA, 21 nt, synthetic construct
  source 1..21: mol_type = other RNA
ggctcatgcggtaccagttta

SEQ ID NO: 2015 - RNA, 21 nt, synthetic construct
  source 1..21: mol_type = other RNA
ggctctctttgatctgcgcct

SEQ ID NO: 2016 - RNA, 21 nt, synthetic construct
  source 1..21: mol_type = other RNA
ggctgcggtcctcggggaagg

SEQ ID NO: 2017 - RNA, 21 nt, synthetic construct
  source 1..21: mol_type = other RNA
ggctggggagaaggtgggggg

SEQ ID NO: 2018 - RNA, 21 nt, synthetic construct
  source 1..21: mol_type = other RNA
gggaaggcggccagcttgtcc

SEQ ID NO: 2019 - RNA, 21 nt, synthetic construct
  source 1..21: mol_type = other RNA
gggacaacgccaccttcacct

SEQ ID NO: 2020 - RNA, 21 nt, synthetic construct
  source 1..21: mol_type = other RNA
gggagatggccccacagaggt

SEQ ID NO: 2021 - RNA, 21 nt, synthetic construct
  source 1..21: mol_type = other RNA
gggagtctgagagatggagag

SEQ ID NO: 2022 - RNA, 21 nt, synthetic construct
  source 1..21: mol_type = other RNA
gggcagagctcagggtgacag

SEQ ID NO: 2023 - RNA, 21 nt, synthetic construct
  source 1..21: mol_type = other RNA
gggcagttgtgtgacacggaa

SEQ ID NO: 2024 - RNA, 21 nt, synthetic construct
  source 1..21: mol_type = other RNA
gggccagggagatggccccac

SEQ ID NO: 2025 - RNA, 21 nt, synthetic construct
  source 1..21: mol_type = other RNA
gggccatctccctggccccca

SEQ ID NO: 2026 - RNA, 21 nt, synthetic construct
  source 1..21: mol_type = other RNA
gggcccggcgcaatgacagcg

SEQ ID NO: 2027 - RNA, 21 nt, synthetic construct
  source 1..21: mol_type = other RNA
gggccctgaccacgctcatgt

SEQ ID NO: 2028 - RNA, 21 nt, synthetic construct
  source 1..21: mol_type = other RNA
gggcctgtctggggagtctga

SEQ ID NO: 2029 - RNA, 21 nt, synthetic construct
  source 1..21: mol_type = other RNA
gggcgtgacttccacatgagc

SEQ ID NO: 2030 - RNA, 21 nt, synthetic construct
  source 1..21: mol_type = other RNA
gggctcatgcggtaccagttt

SEQ ID NO: 2031 - RNA, 21 nt, synthetic construct
  source 1..21: mol_type = other RNA
gggctggggagaaggtggggg

SEQ ID NO: 2032 - RNA, 21 nt, synthetic construct
  source 1..21: mol_type = other RNA
ggggaaggcggccagcttgtc

SEQ ID NO: 2033 - RNA, 21 nt, synthetic construct
  source 1..21: mol_type = other RNA
ggggacaacgccaccttcacc

SEQ ID NO: 2034 - RNA, 21 nt, synthetic construct
  source 1..21: mol_type = other RNA
ggggagtctgagagatggaga

SEQ ID NO: 2035 - RNA, 21 nt, synthetic construct
  source 1..21: mol_type = other RNA
ggggccagggagatggcccca

SEQ ID NO: 2036 - RNA, 21 nt, synthetic construct
  source 1..21: mol_type = other RNA
ggggctcatgcggtaccagtt

SEQ ID NO: 2037 - RNA, 21 nt, synthetic construct
  source 1..21: mol_type = other RNA
ggggggttccagggcctgtct

SEQ ID NO: 2038 - RNA, 21 nt, synthetic construct
  source 1..21: mol_type = other RNA
gggggttccagggcctgtctg

SEQ ID NO: 2039 - RNA, 21 nt, synthetic construct
  source 1..21: mol_type = other RNA
ggggttccagggcctgtctgg

SEQ ID NO: 2040 - RNA, 21 nt, synthetic construct
  source 1..21: mol_type = other RNA
gggtgacaggtgcggcctcgg

SEQ ID NO: 2041 - RNA, 21 nt, synthetic construct
  source 1..21: mol_type = other RNA
gggttccagggcctgtctggg

SEQ ID NO: 2042 - RNA, 21 nt, synthetic construct
  source 1..21: mol_type = other RNA
ggtaccagtttagcacgaagc

SEQ ID NO: 2043 - RNA, 21 nt, synthetic construct
  source 1..21: mol_type = other RNA
ggtaccgcatgagccccagca

SEQ ID NO: 2044 - RNA, 21 nt, synthetic construct
  source 1..21: mol_type = other RNA
ggtaggtgccgctgtcattgc

SEQ ID NO: 2045 - RNA, 21 nt, synthetic construct
  source 1..21: mol_type = other RNA
ggtcaccacgagcagggctgg

SEQ ID NO: 2046 - RNA, 21 nt, synthetic construct
  source 1..21: mol_type = other RNA
ggtcagggcccggcgcaatga

SEQ ID NO: 2047 - RNA, 21 nt, synthetic construct
  source 1..21: mol_type = other RNA
ggtcctcggggaaggcggcca

SEQ ID NO: 2048 - RNA, 21 nt, synthetic construct
  source 1..21: mol_type = other RNA
ggtgaaggtggcgttgtcccc

SEQ ID NO: 2049 - RNA, 21 nt, synthetic construct
  source 1..21: mol_type = other RNA
ggtgacaggtgcggcctcgga

SEQ ID NO: 2050 - RNA, 21 nt, synthetic construct
  source 1..21: mol_type = other RNA
ggtgaccgaaggggacaacgc

SEQ ID NO: 2051 - RNA, 21 nt, synthetic construct
  source 1..21: mol_type = other RNA
ggtgccgctgtcattgcgccg

SEQ ID NO: 2052 - RNA, 21 nt, synthetic construct
  source 1..21: mol_type = other RNA
ggtggcgttgtccccttcggt

SEQ ID NO: 2053 - RNA, 21 nt, synthetic construct
  source 1..21: mol_type = other RNA
ggttccagggcctgtctgggg

SEQ ID NO: 2054 - RNA, 21 nt, synthetic construct
  source 1..21: mol_type = other RNA
ggttgctggggctcatgcggt

SEQ ID NO: 2055 - RNA, 21 nt, synthetic construct
  source 1..21: mol_type = other RNA
gtaccagtttagcacgaagct

SEQ ID NO: 2056 - RNA, 21 nt, synthetic construct
  source 1..21: mol_type = other RNA
gtaccgcatgagccccagcaa

SEQ ID NO: 2057 - RNA, 21 nt, synthetic construct
  source 1..21: mol_type = other RNA
gtaggtgccgctgtcattgcg

SEQ ID NO: 2058 - RNA, 21 nt, synthetic construct
  source 1..21: mol_type = other RNA
gtcacacaactgcccaacggg

SEQ ID NO: 2059 - RNA, 21 nt, synthetic construct
  source 1..21: mol_type = other RNA
gtcaccacgagcagggctggg

SEQ ID NO: 2060 - RNA, 21 nt, synthetic construct
  source 1..21: mol_type = other RNA
gtcaccctgagctctgcccgc

SEQ ID NO: 2061 - RNA, 21 nt, synthetic construct
  source 1..21: mol_type = other RNA
gtcacgcccgttgggcagttg

SEQ ID NO: 2062 - RNA, 21 nt, synthetic construct
  source 1..21: mol_type = other RNA
gtcagggcccggcgcaatgac

SEQ ID NO: 2063 - RNA, 21 nt, synthetic construct
  source 1..21: mol_type = other RNA
gtcattgcgccgggccctgac

SEQ ID NO: 2064 - RNA, 21 nt, synthetic construct
  source 1..21: mol_type = other RNA
gtccccttcggtcaccacgag

SEQ ID NO: 2065 - RNA, 21 nt, synthetic construct
  source 1..21: mol_type = other RNA
gtccgtctggttgctggggct

SEQ ID NO: 2066 - RNA, 21 nt, synthetic construct
  source 1..21: mol_type = other RNA
gtcctcggggaaggcggccag

SEQ ID NO: 2067 - RNA, 21 nt, synthetic construct
  source 1..21: mol_type = other RNA
gtctgagagatggagagaggt

SEQ ID NO: 2068 - RNA, 21 nt, synthetic construct
  source 1..21: mol_type = other RNA
gtctggggagtctgagagatg

SEQ ID NO: 2069 - RNA, 21 nt, synthetic construct
  source 1..21: mol_type = other RNA
gtctggttgctggggctcatg

SEQ ID NO: 2070 - RNA, 21 nt, synthetic construct
  source 1..21: mol_type = other RNA
gtgaaggtggcgttgtcccct

SEQ ID NO: 2071 - RNA, 21 nt, synthetic construct
  source 1..21: mol_type = other RNA
gtgacacggaagcggcagtcc

SEQ ID NO: 2072 - RNA, 21 nt, synthetic construct
  source 1..21: mol_type = other RNA
gtgacaggtgcggcctcggag

SEQ ID NO: 2073 - RNA, 21 nt, synthetic construct
  source 1..21: mol_type = other RNA
gtgaccgaaggggacaacgcc

SEQ ID NO: 2074 - RNA, 21 nt, synthetic construct
  source 1..21: mol_type = other RNA
gtgacttccacatgagcgtgg

SEQ ID NO: 2075 - RNA, 21 nt, synthetic construct
  source 1..21: mol_type = other RNA
gtgccgctgtcattgcgccgg

SEQ ID NO: 2076 - RNA, 21 nt, synthetic construct
  source 1..21: mol_type = other RNA
gtgctaaactggtaccgcatg

SEQ ID NO: 2077 - RNA, 21 nt, synthetic construct
  source 1..21: mol_type = other RNA
gtggaagtcacgcccgttggg

SEQ ID NO: 2078 - RNA, 21 nt, synthetic construct
  source 1..21: mol_type = other RNA
gtggcgttgtccccttcggtc

SEQ ID NO: 2079 - RNA, 21 nt, synthetic construct
  source 1..21: mol_type = other RNA
gtggggccatctccctggccc

SEQ ID NO: 2080 - RNA, 21 nt, synthetic construct
  source 1..21: mol_type = other RNA
gtggtcagggcccggcgcaat

SEQ ID NO: 2081 - RNA, 21 nt, synthetic construct
  source 1..21: mol_type = other RNA
gtggtgaccgaaggggacaac

SEQ ID NO: 2082 - RNA, 21 nt, synthetic construct
  source 1..21: mol_type = other RNA
gtgtcacacaactgcccaacg

SEQ ID NO: 2083 - RNA, 21 nt, synthetic construct
  source 1..21: mol_type = other RNA
gtgtgacacggaagcggcagt

SEQ ID NO: 2084 - RNA, 21 nt, synthetic construct
  source 1..21: mol_type = other RNA
gtgttggagaagctgcaggtg

SEQ ID NO: 2085 - RNA, 21 nt, synthetic construct
  source 1..21: mol_type = other RNA
gttccagggcctgtctgggga

SEQ ID NO: 2086 - RNA, 21 nt, synthetic construct
  source 1..21: mol_type = other RNA
gttgctggggctcatgcggta

SEQ ID NO: 2087 - RNA, 21 nt, synthetic construct
  source 1..21: mol_type = other RNA
gttggagaagctgcaggtgaa

SEQ ID NO: 2088 - RNA, 21 nt, synthetic construct
  source 1..21: mol_type = other RNA
gttgggcagttgtgtgacacg

SEQ ID NO: 2089 - RNA, 21 nt, synthetic construct
  source 1..21: mol_type = other RNA
gttgtccccttcggtcaccac

SEQ ID NO: 2090 - RNA, 21 nt, synthetic construct
  source 1..21: mol_type = other RNA
gttgtgtgacacggaagcggc

SEQ ID NO: 2091 - RNA, 21 nt, synthetic construct
  source 1..21: mol_type = other RNA
gtttagcacgaagctctccga

SEQ ID NO: 2092 - RNA, 21 nt, synthetic construct
  source 1..21: mol_type = other RNA
taaactggtaccgcatgagcc

SEQ ID NO: 2093 - RNA, 21 nt, synthetic construct
  source 1..21: mol_type = other RNA
taccagtttagcacgaagctc

SEQ ID NO: 2094 - RNA, 21 nt, synthetic construct
  source 1..21: mol_type = other RNA
taccgcatgagccccagcaac

SEQ ID NO: 2095 - RNA, 21 nt, synthetic construct
  source 1..21: mol_type = other RNA
tacctctgtggggccatctcc

SEQ ID NO: 2096 - RNA, 21 nt, synthetic construct
  source 1..21: mol_type = other RNA
tagcacgaagctctccgatgt

SEQ ID NO: 2097 - RNA, 21 nt, synthetic construct
  source 1..21: mol_type = other RNA
taggtgccgctgtcattgcgc

SEQ ID NO: 2098 - RNA, 21 nt, synthetic construct
  source 1..21: mol_type = other RNA
tcaaagagagcctgcgggcag

SEQ ID NO: 2099 - RNA, 21 nt, synthetic construct
  source 1..21: mol_type = other RNA
tcacacaactgcccaacgggc

SEQ ID NO: 2100 - RNA, 21 nt, synthetic construct
  source 1..21: mol_type = other RNA
tcaccacgagcagggctgggg

SEQ ID NO: 2101 - RNA, 21 nt, synthetic construct
  source 1..21: mol_type = other RNA
tcaccctgagctctgcccgca

SEQ ID NO: 2102 - RNA, 21 nt, synthetic construct
  source 1..21: mol_type = other RNA
tcacctctctccatctctcag

SEQ ID NO: 2103 - RNA, 21 nt, synthetic construct
  source 1..21: mol_type = other RNA
tcacctgcagcttctccaaca

SEQ ID NO: 2104 - RNA, 21 nt, synthetic construct
  source 1..21: mol_type = other RNA
tcacgcccgttgggcagttgt

SEQ ID NO: 2105 - RNA, 21 nt, synthetic construct
  source 1..21: mol_type = other RNA
tcagactccccagacaggccc

SEQ ID NO: 2106 - RNA, 21 nt, synthetic construct
  source 1..21: mol_type = other RNA
tcagctcacccctgccccggg

SEQ ID NO: 2107 - RNA, 21 nt, synthetic construct
  source 1..21: mol_type = other RNA
tcagggcccggcgcaatgaca

SEQ ID NO: 2108 - RNA, 21 nt, synthetic construct
  source 1..21: mol_type = other RNA
tcagggtgacaggtgcggcct

SEQ ID NO: 2109 - RNA, 21 nt, synthetic construct
  source 1..21: mol_type = other RNA
tcatgcggtaccagtttagca

SEQ ID NO: 2110 - RNA, 21 nt, synthetic construct
  source 1..21: mol_type = other RNA
tcatgtggaagtcacgcccgt

SEQ ID NO: 2111 - RNA, 21 nt, synthetic construct
  source 1..21: mol_type = other RNA
tcattgcgccgggccctgacc

SEQ ID NO: 2112 - RNA, 21 nt, synthetic construct
  source 1..21: mol_type = other RNA
tccaacacatcggagagcttc

SEQ ID NO: 2113 - RNA, 21 nt, synthetic construct
  source 1..21: mol_type = other RNA
tccacatgagcgtggtcaggg

SEQ ID NO: 2114 - RNA, 21 nt, synthetic construct
  source 1..21: mol_type = other RNA
tccagggcctgtctggggagt

SEQ ID NO: 2115 - RNA, 21 nt, synthetic construct
  source 1..21: mol_type = other RNA
tccatctctcagactccccag

SEQ ID NO: 2116 - RNA, 21 nt, synthetic construct
  source 1..21: mol_type = other RNA
tccccagacaggccctggaac

SEQ ID NO: 2117 - RNA, 21 nt, synthetic construct
  source 1..21: mol_type = other RNA
tccccagccctgctcgtggtg

SEQ ID NO: 2118 - RNA, 21 nt, synthetic construct
  source 1..21: mol_type = other RNA
tccccgaggaccgcagccagc

SEQ ID NO: 2119 - RNA, 21 nt, synthetic construct
  source 1..21: mol_type = other RNA
tccccttcggtcaccacgagc

SEQ ID NO: 2120 - RNA, 21 nt, synthetic construct
  source 1..21: mol_type = other RNA
tccctggcccccaaggcgcag

SEQ ID NO: 2121 - RNA, 21 nt, synthetic construct
  source 1..21: mol_type = other RNA
tccgaggccgcacctgtcacc

SEQ ID NO: 2122 - RNA, 21 nt, synthetic construct
  source 1..21: mol_type = other RNA
tccgatgtgttggagaagctg

SEQ ID NO: 2123 - RNA, 21 nt, synthetic construct
  source 1..21: mol_type = other RNA
tccgtctggttgctggggctc

SEQ ID NO: 2124 - RNA, 21 nt, synthetic construct
  source 1..21: mol_type = other RNA
tccgtgtcacacaactgccca

SEQ ID NO: 2125 - RNA, 21 nt, synthetic construct
  source 1..21: mol_type = other RNA
tcctcacctctctccatctct

SEQ ID NO: 2126 - RNA, 21 nt, synthetic construct
  source 1..21: mol_type = other RNA
tcctcggggaaggcggccagc

SEQ ID NO: 2127 - RNA, 21 nt, synthetic construct
  source 1..21: mol_type = other RNA
tcggagagcttcgtgctaaac

SEQ ID NO: 2128 - RNA, 21 nt, synthetic construct
  source 1..21: mol_type = other RNA
tcggggaaggcggccagcttg

SEQ ID NO: 2129 - RNA, 21 nt, synthetic construct
  source 1..21: mol_type = other RNA
tcggtcaccacgagcagggct

SEQ ID NO: 2130 - RNA, 21 nt, synthetic construct
  source 1..21: mol_type = other RNA
tcgtgctaaactggtaccgca

SEQ ID NO: 2131 - RNA, 21 nt, synthetic construct
  source 1..21: mol_type = other RNA
tcgtggtgaccgaaggggaca

SEQ ID NO: 2132 - RNA, 21 nt, synthetic construct
  source 1..21: mol_type = other RNA
tctcagactccccagacaggc

SEQ ID NO: 2133 - RNA, 21 nt, synthetic construct
  source 1..21: mol_type = other RNA
tctccaacacatcggagagct

SEQ ID NO: 2134 - RNA, 21 nt, synthetic construct
  source 1..21: mol_type = other RNA
tctccatctctcagactcccc

SEQ ID NO: 2135 - RNA, 21 nt, synthetic construct
  source 1..21: mol_type = other RNA
tctccccagccctgctcgtgg

SEQ ID NO: 2136 - RNA, 21 nt, synthetic construct
  source 1..21: mol_type = other RNA
tctccctggcccccaaggcgc

SEQ ID NO: 2137 - RNA, 21 nt, synthetic construct
  source 1..21: mol_type = other RNA
tctccgatgtgttggagaagc

SEQ ID NO: 2138 - RNA, 21 nt, synthetic construct
  source 1..21: mol_type = other RNA
tctctcagactccccagacag

SEQ ID NO: 2139 - RNA, 21 nt, synthetic construct
  source 1..21: mol_type = other RNA
tctctccatctctcagactcc

SEQ ID NO: 2140 - RNA, 21 nt, synthetic construct
  source 1..21: mol_type = other RNA
tctctttgatctgcgccttgg

SEQ ID NO: 2141 - RNA, 21 nt, synthetic construct
  source 1..21: mol_type = other RNA
tctgagagatggagagaggtg

SEQ ID NO: 2142 - RNA, 21 nt, synthetic construct
  source 1..21: mol_type = other RNA
tctgcccgcaggctctctttg

SEQ ID NO: 2143 - RNA, 21 nt, synthetic construct
  source 1..21: mol_type = other RNA
tctgcgccttgggggccaggg

SEQ ID NO: 2144 - RNA, 21 nt, synthetic construct
  source 1..21: mol_type = other RNA
tctggggagtctgagagatgg

SEQ ID NO: 2145 - RNA, 21 nt, synthetic construct
  source 1..21: mol_type = other RNA
tctggttgctggggctcatgc

SEQ ID NO: 2146 - RNA, 21 nt, synthetic construct
  source 1..21: mol_type = other RNA
tctgtggggccatctccctgg

SEQ ID NO: 2147 - RNA, 21 nt, synthetic construct
  source 1..21: mol_type = other RNA
tctttgatctgcgccttgggg

SEQ ID NO: 2148 - RNA, 21 nt, synthetic construct
  source 1..21: mol_type = other RNA
tgaaggtggcgttgtcccctt

SEQ ID NO: 2149 - RNA, 21 nt, synthetic construct
  source 1..21: mol_type = other RNA
tgacacggaagcggcagtcct

SEQ ID NO: 2150 - RNA, 21 nt, synthetic construct
  source 1..21: mol_type = other RNA
tgacagcggcacctacctctg

SEQ ID NO: 2151 - RNA, 21 nt, synthetic construct
  source 1..21: mol_type = other RNA
tgacaggtgcggcctcggagg

SEQ ID NO: 2152 - RNA, 21 nt, synthetic construct
  source 1..21: mol_type = other RNA
tgaccacgctcatgtggaagt

SEQ ID NO: 2153 - RNA, 21 nt, synthetic construct
  source 1..21: mol_type = other RNA
tgaccgaaggggacaacgcca

SEQ ID NO: 2154 - RNA, 21 nt, synthetic construct
  source 1..21: mol_type = other RNA
tgacttccacatgagcgtggt

SEQ ID NO: 2155 - RNA, 21 nt, synthetic construct
  source 1..21: mol_type = other RNA
tgagagatggagagaggtgag

SEQ ID NO: 2156 - RNA, 21 nt, synthetic construct
  source 1..21: mol_type = other RNA
tgagccccagcaaccagacgg

SEQ ID NO: 2157 - RNA, 21 nt, synthetic construct
  source 1..21: mol_type = other RNA
tgagcgtggtcagggcccggc

SEQ ID NO: 2158 - RNA, 21 nt, synthetic construct
  source 1..21: mol_type = other RNA
tgagctctgcccgcaggctct

SEQ ID NO: 2159 - RNA, 21 nt, synthetic construct
  source 1..21: mol_type = other RNA
tgatctgcgccttgggggcca

SEQ ID NO: 2160 - RNA, 21 nt, synthetic construct
  source 1..21: mol_type = other RNA
tgcagcttctccaacacatcg

SEQ ID NO: 2161 - RNA, 21 nt, synthetic construct
  source 1..21: mol_type = other RNA
tgcaggtgaaggtggcgttgt

SEQ ID NO: 2162 - RNA, 21 nt, synthetic construct
  source 1..21: mol_type = other RNA
tgcccaacgggcgtgacttcc

SEQ ID NO: 2163 - RNA, 21 nt, synthetic construct
  source 1..21: mol_type = other RNA
tgcccgcaggctctctttgat

SEQ ID NO: 2164 - RNA, 21 nt, synthetic construct
  source 1..21: mol_type = other RNA
tgccgctgtcattgcgccggg

SEQ ID NO: 2165 - RNA, 21 nt, synthetic construct
  source 1..21: mol_type = other RNA
tgccgcttccgtgtcacacaa

SEQ ID NO: 2166 - RNA, 21 nt, synthetic construct
  source 1..21: mol_type = other RNA
tgcgccttgggggccagggag

SEQ ID NO: 2167 - RNA, 21 nt, synthetic construct
  source 1..21: mol_type = other RNA
tgcgggcagagctcagggtga

SEQ ID NO: 2168 - RNA, 21 nt, synthetic construct
  source 1..21: mol_type = other RNA
tgcggtaccagtttagcacga

SEQ ID NO: 2169 - RNA, 21 nt, synthetic construct
  source 1..21: mol_type = other RNA
tgcggtcctcggggaaggcgg

SEQ ID NO: 2170 - RNA, 21 nt, synthetic construct
  source 1..21: mol_type = other RNA
tgctaaactggtaccgcatga

SEQ ID NO: 2171 - RNA, 21 nt, synthetic construct
  source 1..21: mol_type = other RNA
tgctcgtggtgaccgaagggg

SEQ ID NO: 2172 - RNA, 21 nt, synthetic construct
  source 1..21: mol_type = other RNA
tgctggggctcatgcggtacc

SEQ ID NO: 2173 - RNA, 21 nt, synthetic construct
  source 1..21: mol_type = other RNA
tggaagtcacgcccgttgggc

SEQ ID NO: 2174 - RNA, 21 nt, synthetic construct
  source 1..21: mol_type = other RNA
tggagaagctgcaggtgaagg

SEQ ID NO: 2175 - RNA, 21 nt, synthetic construct
  source 1..21: mol_type = other RNA
tggagagaggtgaggaagggg

SEQ ID NO: 2176 - RNA, 21 nt, synthetic construct
  source 1..21: mol_type = other RNA
tggccccacagaggtaggtgc

SEQ ID NO: 2177 - RNA, 21 nt, synthetic construct
  source 1..21: mol_type = other RNA
tggcccccaaggcgcagatca

SEQ ID NO: 2178 - RNA, 21 nt, synthetic construct
  source 1..21: mol_type = other RNA
tggccgccttccccgaggacc

SEQ ID NO: 2179 - RNA, 21 nt, synthetic construct
  source 1..21: mol_type = other RNA
tggcgttgtccccttcggtca

SEQ ID NO: 2180 - RNA, 21 nt, synthetic construct
  source 1..21: mol_type = other RNA
tggctgcggtcctcggggaag

SEQ ID NO: 2181 - RNA, 21 nt, synthetic construct
  source 1..21: mol_type = other RNA
tgggcagttgtgtgacacgga

SEQ ID NO: 2182 - RNA, 21 nt, synthetic construct
  source 1..21: mol_type = other RNA
tggggagtctgagagatggag

SEQ ID NO: 2183 - RNA, 21 nt, synthetic construct
  source 1..21: mol_type = other RNA
tggggccatctccctggcccc

SEQ ID NO: 2184 - RNA, 21 nt, synthetic construct
  source 1..21: mol_type = other RNA
tggggctcatgcggtaccagt

SEQ ID NO: 2185 - RNA, 21 nt, synthetic construct
  source 1..21: mol_type = other RNA
tgggggccagggagatggccc

SEQ ID NO: 2186 - RNA, 21 nt, synthetic construct
  source 1..21: mol_type = other RNA
tggtaccgcatgagccccagc

SEQ ID NO: 2187 - RNA, 21 nt, synthetic construct
  source 1..21: mol_type = other RNA
tggtcagggcccggcgcaatg

SEQ ID NO: 2188 - RNA, 21 nt, synthetic construct
  source 1..21: mol_type = other RNA
tggtgaccgaaggggacaacg

SEQ ID NO: 2189 - RNA, 21 nt, synthetic construct
  source 1..21: mol_type = other RNA
tggttgctggggctcatgcgg

SEQ ID NO: 2190 - RNA, 21 nt, synthetic construct
  source 1..21: mol_type = other RNA
tgtcacacaactgcccaacgg

SEQ ID NO: 2191 - RNA, 21 nt, synthetic construct
  source 1..21: mol_type = other RNA
tgtcaccctgagctctgcccg

SEQ ID NO: 2192 - RNA, 21 nt, synthetic construct
  source 1..21: mol_type = other RNA
tgtcattgcgccgggccctga

SEQ ID NO: 2193 - RNA, 21 nt, synthetic construct
  source 1..21: mol_type = other RNA
tgtccccttcggtcaccacga

SEQ ID NO: 2194 - RNA, 21 nt, synthetic construct
  source 1..21: mol_type = other RNA
tgtccgtctggttgctggggc

SEQ ID NO: 2195 - RNA, 21 nt, synthetic construct
  source 1..21: mol_type = other RNA
tgtctggggagtctgagagat

SEQ ID NO: 2196 - RNA, 21 nt, synthetic construct
  source 1..21: mol_type = other RNA
tgtgacacggaagcggcagtc

SEQ ID NO: 2197 - RNA, 21 nt, synthetic construct
  source 1..21: mol_type = other RNA
tgtggaagtcacgcccgttgg

SEQ ID NO: 2198 - RNA, 21 nt, synthetic construct
  source 1..21: mol_type = other RNA
tgtggggccatctccctggcc

SEQ ID NO: 2199 - RNA, 21 nt, synthetic construct
  source 1..21: mol_type = other RNA
tgtgtgacacggaagcggcag

SEQ ID NO: 2200 - RNA, 21 nt, synthetic construct
  source 1..21: mol_type = other RNA
tgtgttggagaagctgcaggt

SEQ ID NO: 2201 - RNA, 21 nt, synthetic construct
  source 1..21: mol_type = other RNA
tgttggagaagctgcaggtga

SEQ ID NO: 2202 - RNA, 21 nt, synthetic construct
  source 1..21: mol_type = other RNA
ttagcacgaagctctccgatg

SEQ ID NO: 2203 - RNA, 21 nt, synthetic construct
  source 1..21: mol_type = other RNA
ttcacctgcagcttctccaac

SEQ ID NO: 2204 - RNA, 21 nt, synthetic construct
  source 1..21: mol_type = other RNA
ttccacatgagcgtggtcagg

SEQ ID NO: 2205 - RNA, 21 nt, synthetic construct
  source 1..21: mol_type = other RNA
ttccagggcctgtctggggag

SEQ ID NO: 2206 - RNA, 21 nt, synthetic construct
  source 1..21: mol_type = other RNA
ttccccgaggaccgcagccag

SEQ ID NO: 2207 - RNA, 21 nt, synthetic construct
  source 1..21: mol_type = other RNA
ttccgtgtcacacaactgccc

SEQ ID NO: 2208 - RNA, 21 nt, synthetic construct
  source 1..21: mol_type = other RNA
ttcctcacctctctccatctc

SEQ ID NO: 2209 - RNA, 21 nt, synthetic construct
  source 1..21: mol_type = other RNA
ttcggtcaccacgagcagggc

SEQ ID NO: 2210 - RNA, 21 nt, synthetic construct
  source 1..21: mol_type = other RNA
ttcgtgctaaactggtaccgc

SEQ ID NO: 2211 - RNA, 21 nt, synthetic construct
  source 1..21: mol_type = other RNA
ttctccaacacatcggagagc

SEQ ID NO: 2212 - RNA, 21 nt, synthetic construct
  source 1..21: mol_type = other RNA
ttctccccagccctgctcgtg

SEQ ID NO: 2213 - RNA, 21 nt, synthetic construct
  source 1..21: mol_type = other RNA
ttgatctgcgccttgggggcc

SEQ ID NO: 2214 - RNA, 21 nt, synthetic construct
  source 1..21: mol_type = other RNA
ttgcgccgggccctgaccacg

SEQ ID NO: 2215 - RNA, 21 nt, synthetic construct
  source 1..21: mol_type = other RNA
ttgctggggctcatgcggtac

SEQ ID NO: 2216 - RNA, 21 nt, synthetic construct
  source 1..21: mol_type = other RNA
ttggagaagctgcaggtgaag

SEQ ID NO: 2217 - RNA, 21 nt, synthetic construct
  source 1..21: mol_type = other RNA
ttgggcagttgtgtgacacgg

SEQ ID NO: 2218 - RNA, 21 nt, synthetic construct
  source 1..21: mol_type = other RNA
ttgggggccagggagatggcc

SEQ ID NO: 2219 - RNA, 21 nt, synthetic construct
  source 1..21: mol_type = other RNA
ttgtccccttcggtcaccacg

SEQ ID NO: 2220 - RNA, 21 nt, synthetic construct
  source 1..21: mol_type = other RNA
ttgtccgtctggttgctgggg

SEQ ID NO: 2221 - RNA, 21 nt, synthetic construct
  source 1..21: mol_type = other RNA
ttgtgtgacacggaagcggca

SEQ ID NO: 2222 - RNA, 21 nt, synthetic construct
  source 1..21: mol_type = other RNA
tttagcacgaagctctccgat

SEQ ID NO: 2223 - RNA, 21 nt, synthetic construct
  source 1..21: mol_type = other RNA
tttgatctgcgccttgggggc

SEQ ID NO: 2224 - RNA, 22 nt, synthetic construct
  source 1..22: mol_type = other RNA
aaactggtaccgcatgagcccc

SEQ ID NO: 2225 - RNA, 22 nt, synthetic construct
  source 1..22: mol_type = other RNA
aaagagagcctgcgggcagagc

SEQ ID NO: 2226 - RNA, 22 nt, synthetic construct
  source 1..22: mol_type = other RNA
aacacatcggagagcttcgtgc

SEQ ID NO: 2227 - RNA, 22 nt, synthetic construct
  source 1..22: mol_type = other RNA
aaccagacggacaagctggccg

SEQ ID NO: 2228 - RNA, 22 nt, synthetic construct
  source 1..22: mol_type = other RNA
aacgccaccttcacctgcagct

SEQ ID NO: 2229 - RNA, 22 nt, synthetic construct
  source 1..22: mol_type = other RNA
aacgggcgtgacttccacatga

SEQ ID NO: 2230 - RNA, 22 nt, synthetic construct
  source 1..22: mol_type = other RNA
aactgcccaacgggcgtgactt

SEQ ID NO: 2231 - RNA, 22 nt, synthetic construct
  source 1..22: mol_type = other RNA
aactggtaccgcatgagcccca

SEQ ID NO: 2232 - RNA, 22 nt, synthetic construct
  source 1..22: mol_type = other RNA
aagagagcctgcgggcagagct

SEQ ID NO: 2233 - RNA, 22 nt, synthetic construct
  source 1..22: mol_type = other RNA
aagcggcagtcctggccgggct

SEQ ID NO: 2234 - RNA, 22 nt, synthetic construct
  source 1..22: mol_type = other RNA
aagctctccgatgtgttggaga

SEQ ID NO: 2235 - RNA, 22 nt, synthetic construct
  source 1..22: mol_type = other RNA
aagctgcaggtgaaggtggcgt

SEQ ID NO: 2236 - RNA, 22 nt, synthetic construct
  source 1..22: mol_type = other RNA
aagctggccgccttccccgagg

SEQ ID NO: 2237 - RNA, 22 nt, synthetic construct
  source 1..22: mol_type = other RNA
aaggcgcagatcaaagagagcc

SEQ ID NO: 2238 - RNA, 22 nt, synthetic construct
  source 1..22: mol_type = other RNA
aaggcggccagcttgtccgtct

SEQ ID NO: 2239 - RNA, 22 nt, synthetic construct
  source 1..22: mol_type = other RNA
aaggggacaacgccaccttcac

SEQ ID NO: 2240 - RNA, 22 nt, synthetic construct
  source 1..22: mol_type = other RNA
aaggtggcgttgtccccttcgg

SEQ ID NO: 2241 - RNA, 22 nt, synthetic construct
  source 1..22: mol_type = other RNA
aagtcacgcccgttgggcagtt

SEQ ID NO: 2242 - RNA, 22 nt, synthetic construct
  source 1..22: mol_type = other RNA
aatgacagcggcacctacctct

SEQ ID NO: 2243 - RNA, 22 nt, synthetic construct
  source 1..22: mol_type = other RNA
acaacgccaccttcacctgcag

SEQ ID NO: 2244 - RNA, 22 nt, synthetic construct
  source 1..22: mol_type = other RNA
acaactgcccaacgggcgtgac

SEQ ID NO: 2245 - RNA, 22 nt, synthetic construct
  source 1..22: mol_type = other RNA
acaagctggccgccttccccga

SEQ ID NO: 2246 - RNA, 22 nt, synthetic construct
  source 1..22: mol_type = other RNA
acacaactgcccaacgggcgtg

SEQ ID NO: 2247 - RNA, 22 nt, synthetic construct
  source 1..22: mol_type = other RNA
acacatcggagagcttcgtgct

SEQ ID NO: 2248 - RNA, 22 nt, synthetic construct
  source 1..22: mol_type = other RNA
acacggaagcggcagtcctggc

SEQ ID NO: 2249 - RNA, 22 nt, synthetic construct
  source 1..22: mol_type = other RNA
acagaggtaggtgccgctgtca

SEQ ID NO: 2250 - RNA, 22 nt, synthetic construct
  source 1..22: mol_type = other RNA
acagcggcacctacctctgtgg

SEQ ID NO: 2251 - RNA, 22 nt, synthetic construct
  source 1..22: mol_type = other RNA
acaggtgcggcctcggaggccc

SEQ ID NO: 2252 - RNA, 22 nt, synthetic construct
  source 1..22: mol_type = other RNA
acatcggagagcttcgtgctaa

SEQ ID NO: 2253 - RNA, 22 nt, synthetic construct
  source 1..22: mol_type = other RNA
acatgagcgtggtcagggcccg

SEQ ID NO: 2254 - RNA, 22 nt, synthetic construct
  source 1..22: mol_type = other RNA
accacgagcagggctggggaga

SEQ ID NO: 2255 - RNA, 22 nt, synthetic construct
  source 1..22: mol_type = other RNA
accacgctcatgtggaagtcac

SEQ ID NO: 2256 - RNA, 22 nt, synthetic construct
  source 1..22: mol_type = other RNA
accagacggacaagctggccgc

SEQ ID NO: 2257 - RNA, 22 nt, synthetic construct
  source 1..22: mol_type = other RNA
accagtttagcacgaagctctc

SEQ ID NO: 2258 - RNA, 22 nt, synthetic construct
  source 1..22: mol_type = other RNA
acccagccccttcctcacctct

SEQ ID NO: 2259 - RNA, 22 nt, synthetic construct
  source 1..22: mol_type = other RNA
accctgagctctgcccgcaggc

SEQ ID NO: 2260 - RNA, 22 nt, synthetic construct
  source 1..22: mol_type = other RNA
accgaaggggacaacgccacct

SEQ ID NO: 2261 - RNA, 22 nt, synthetic construct
  source 1..22: mol_type = other RNA
accgcagccagcccggccagga

SEQ ID NO: 2262 - RNA, 22 nt, synthetic construct
  source 1..22: mol_type = other RNA
accgcatgagccccagcaacca

SEQ ID NO: 2263 - RNA, 22 nt, synthetic construct
  source 1..22: mol_type = other RNA
acctacctctgtggggccatct

SEQ ID NO: 2264 - RNA, 22 nt, synthetic construct
  source 1..22: mol_type = other RNA
acctctctccatctctcagact

SEQ ID NO: 2265 - RNA, 22 nt, synthetic construct
  source 1..22: mol_type = other RNA
acctctgtggggccatctccct

SEQ ID NO: 2266 - RNA, 22 nt, synthetic construct
  source 1..22: mol_type = other RNA
acctgcagcttctccaacacat

SEQ ID NO: 2267 - RNA, 22 nt, synthetic construct
  source 1..22: mol_type = other RNA
acctgtcaccctgagctctgcc

SEQ ID NO: 2268 - RNA, 22 nt, synthetic construct
  source 1..22: mol_type = other RNA
accttcacctgcagcttctcca

SEQ ID NO: 2269 - RNA, 22 nt, synthetic construct
  source 1..22: mol_type = other RNA
accttctccccagccctgctcg

SEQ ID NO: 2270 - RNA, 22 nt, synthetic construct
  source 1..22: mol_type = other RNA
acgaagctctccgatgtgttgg

SEQ ID NO: 2271 - RNA, 22 nt, synthetic construct
  source 1..22: mol_type = other RNA
acgagcagggctggggagaagg

SEQ ID NO: 2272 - RNA, 22 nt, synthetic construct
  source 1..22: mol_type = other RNA
acgccaccttcacctgcagctt

SEQ ID NO: 2273 - RNA, 22 nt, synthetic construct
  source 1..22: mol_type = other RNA
acgcccgttgggcagttgtgtg

SEQ ID NO: 2274 - RNA, 22 nt, synthetic construct
  source 1..22: mol_type = other RNA
acgctcatgtggaagtcacgcc

SEQ ID NO: 2275 - RNA, 22 nt, synthetic construct
  source 1..22: mol_type = other RNA
acggaagcggcagtcctggccg

SEQ ID NO: 2276 - RNA, 22 nt, synthetic construct
  source 1..22: mol_type = other RNA
acggacaagctggccgccttcc

SEQ ID NO: 2277 - RNA, 22 nt, synthetic construct
  source 1..22: mol_type = other RNA
acgggcgtgacttccacatgag

SEQ ID NO: 2278 - RNA, 22 nt, synthetic construct
  source 1..22: mol_type = other RNA
actccccagacaggccctggaa

SEQ ID NO: 2279 - RNA, 22 nt, synthetic construct
  source 1..22: mol_type = other RNA
actgcccaacgggcgtgacttc

SEQ ID NO: 2280 - RNA, 22 nt, synthetic construct
  source 1..22: mol_type = other RNA
actgccgcttccgtgtcacaca

SEQ ID NO: 2281 - RNA, 22 nt, synthetic construct
  source 1..22: mol_type = other RNA
actggtaccgcatgagccccag

SEQ ID NO: 2282 - RNA, 22 nt, synthetic construct
  source 1..22: mol_type = other RNA
acttccacatgagcgtggtcag

SEQ ID NO: 2283 - RNA, 22 nt, synthetic construct
  source 1..22: mol_type = other RNA
agaagctgcaggtgaaggtggc

SEQ ID NO: 2284 - RNA, 22 nt, synthetic construct
  source 1..22: mol_type = other RNA
agacggacaagctggccgcctt

SEQ ID NO: 2285 - RNA, 22 nt, synthetic construct
  source 1..22: mol_type = other RNA
agactccccagacaggccctgg

SEQ ID NO: 2286 - RNA, 22 nt, synthetic construct
  source 1..22: mol_type = other RNA
agagagcctgcgggcagagctc

SEQ ID NO: 2287 - RNA, 22 nt, synthetic construct
  source 1..22: mol_type = other RNA
agagatggagagaggtgaggaa

SEQ ID NO: 2288 - RNA, 22 nt, synthetic construct
  source 1..22: mol_type = other RNA
agagcctgcgggcagagctcag

SEQ ID NO: 2289 - RNA, 22 nt, synthetic construct
  source 1..22: mol_type = other RNA
agagctcagggtgacaggtgcg

SEQ ID NO: 2290 - RNA, 22 nt, synthetic construct
  source 1..22: mol_type = other RNA
agagcttcgtgctaaactggta

SEQ ID NO: 2291 - RNA, 22 nt, synthetic construct
  source 1..22: mol_type = other RNA
agaggtaggtgccgctgtcatt

SEQ ID NO: 2292 - RNA, 22 nt, synthetic construct
  source 1..22: mol_type = other RNA
agatcaaagagagcctgcgggc

SEQ ID NO: 2293 - RNA, 22 nt, synthetic construct
  source 1..22: mol_type = other RNA
agatggagagaggtgaggaagg

SEQ ID NO: 2294 - RNA, 22 nt, synthetic construct
  source 1..22: mol_type = other RNA
agatggccccacagaggtaggt

SEQ ID NO: 2295 - RNA, 22 nt, synthetic construct
  source 1..22: mol_type = other RNA
agcaaccagacggacaagctgg

SEQ ID NO: 2296 - RNA, 22 nt, synthetic construct
  source 1..22: mol_type = other RNA
agcacgaagctctccgatgtgt

SEQ ID NO: 2297 - RNA, 22 nt, synthetic construct
  source 1..22: mol_type = other RNA
agcagggctggggagaaggtgg

SEQ ID NO: 2298 - RNA, 22 nt, synthetic construct
  source 1..22: mol_type = other RNA
agccagcccggccaggactgcc

SEQ ID NO: 2299 - RNA, 22 nt, synthetic construct
  source 1..22: mol_type = other RNA
agccccagcaaccagacggaca

SEQ ID NO: 2300 - RNA, 22 nt, synthetic construct
  source 1..22: mol_type = other RNA
agccccttcctcacctctctcc

SEQ ID NO: 2301 - RNA, 22 nt, synthetic construct
  source 1..22: mol_type = other RNA
agcccggccaggactgccgctt

SEQ ID NO: 2302 - RNA, 22 nt, synthetic construct
  source 1..22: mol_type = other RNA
agccctgctcgtggtgaccgaa

SEQ ID NO: 2303 - RNA, 22 nt, synthetic construct
  source 1..22: mol_type = other RNA
agcctgcgggcagagctcaggg

SEQ ID NO: 2304 - RNA, 22 nt, synthetic construct
  source 1..22: mol_type = other RNA
agcggcacctacctctgtgggg

SEQ ID NO: 2305 - RNA, 22 nt, synthetic construct
  source 1..22: mol_type = other RNA
agcggcagtcctggccgggctg

SEQ ID NO: 2306 - RNA, 22 nt, synthetic construct
  source 1..22: mol_type = other RNA
agcgtggtcagggcccggcgca

SEQ ID NO: 2307 - RNA, 22 nt, synthetic construct
  source 1..22: mol_type = other RNA
agctcagggtgacaggtgcggc

SEQ ID NO: 2308 - RNA, 22 nt, synthetic construct
  source 1..22: mol_type = other RNA
agctctccgatgtgttggagaa

SEQ ID NO: 2309 - RNA, 22 nt, synthetic construct
  source 1..22: mol_type = other RNA
agctctgcccgcaggctctctt

SEQ ID NO: 2310 - RNA, 22 nt, synthetic construct
  source 1..22: mol_type = other RNA
agctgcaggtgaaggtggcgtt

SEQ ID NO: 2311 - RNA, 22 nt, synthetic construct
  source 1..22: mol_type = other RNA
agctggccgccttccccgagga

SEQ ID NO: 2312 - RNA, 22 nt, synthetic construct
  source 1..22: mol_type = other RNA
agcttcgtgctaaactggtacc

SEQ ID NO: 2313 - RNA, 22 nt, synthetic construct
  source 1..22: mol_type = other RNA
agcttctccaacacatcggaga

SEQ ID NO: 2314 - RNA, 22 nt, synthetic construct
  source 1..22: mol_type = other RNA
agcttgtccgtctggttgctgg

SEQ ID NO: 2315 - RNA, 22 nt, synthetic construct
  source 1..22: mol_type = other RNA
aggaccgcagccagcccggcca

SEQ ID NO: 2316 - RNA, 22 nt, synthetic construct
  source 1..22: mol_type = other RNA
aggactgccgcttccgtgtcac

SEQ ID NO: 2317 - RNA, 22 nt, synthetic construct
  source 1..22: mol_type = other RNA
aggccgcacctgtcaccctgag

SEQ ID NO: 2318 - RNA, 22 nt, synthetic construct
  source 1..22: mol_type = other RNA
aggcgcagatcaaagagagcct

SEQ ID NO: 2319 - RNA, 22 nt, synthetic construct
  source 1..22: mol_type = other RNA
aggcggccagcttgtccgtctg

SEQ ID NO: 2320 - RNA, 22 nt, synthetic construct
  source 1..22: mol_type = other RNA
aggctctctttgatctgcgcct

SEQ ID NO: 2321 - RNA, 22 nt, synthetic construct
  source 1..22: mol_type = other RNA
agggagatggccccacagaggt

SEQ ID NO: 2322 - RNA, 22 nt, synthetic construct
  source 1..22: mol_type = other RNA
agggcccggcgcaatgacagcg

SEQ ID NO: 2323 - RNA, 22 nt, synthetic construct
  source 1..22: mol_type = other RNA
agggcctgtctggggagtctga

SEQ ID NO: 2324 - RNA, 22 nt, synthetic construct
  source 1..22: mol_type = other RNA
agggctggggagaaggtggggg

SEQ ID NO: 2325 - RNA, 22 nt, synthetic construct
  source 1..22: mol_type = other RNA
aggggacaacgccaccttcacc

SEQ ID NO: 2326 - RNA, 22 nt, synthetic construct
  source 1..22: mol_type = other RNA
agggtgacaggtgcggcctcgg

SEQ ID NO: 2327 - RNA, 22 nt, synthetic construct
  source 1..22: mol_type = other RNA
aggtaggtgccgctgtcattgc

SEQ ID NO: 2328 - RNA, 22 nt, synthetic construct
  source 1..22: mol_type = other RNA
aggtgaaggtggcgttgtcccc

SEQ ID NO: 2329 - RNA, 22 nt, synthetic construct
  source 1..22: mol_type = other RNA
aggtgccgctgtcattgcgccg

SEQ ID NO: 2330 - RNA, 22 nt, synthetic construct
  source 1..22: mol_type = other RNA
aggtggcgttgtccccttcggt

SEQ ID NO: 2331 - RNA, 22 nt, synthetic construct
  source 1..22: mol_type = other RNA
agtcacgcccgttgggcagttg

SEQ ID NO: 2332 - RNA, 22 nt, synthetic construct
  source 1..22: mol_type = other RNA
agtcctggccgggctggctgcg

SEQ ID NO: 2333 - RNA, 22 nt, synthetic construct
  source 1..22: mol_type = other RNA
agtctgagagatggagagaggt

SEQ ID NO: 2334 - RNA, 22 nt, synthetic construct
  source 1..22: mol_type = other RNA
agttgtgtgacacggaagcggc

SEQ ID NO: 2335 - RNA, 22 nt, synthetic construct
  source 1..22: mol_type = other RNA
agtttagcacgaagctctccga

SEQ ID NO: 2336 - RNA, 22 nt, synthetic construct
  source 1..22: mol_type = other RNA
atcaaagagagcctgcgggcag

SEQ ID NO: 2337 - RNA, 22 nt, synthetic construct
  source 1..22: mol_type = other RNA
atcggagagcttcgtgctaaac

SEQ ID NO: 2338 - RNA, 22 nt, synthetic construct
  source 1..22: mol_type = other RNA
atctccctggcccccaaggcgc

SEQ ID NO: 2339 - RNA, 22 nt, synthetic construct
  source 1..22: mol_type = other RNA
atctctcagactccccagacag

SEQ ID NO: 2340 - RNA, 22 nt, synthetic construct
  source 1..22: mol_type = other RNA
atctgcgccttgggggccaggg

SEQ ID NO: 2341 - RNA, 22 nt, synthetic construct
  source 1..22: mol_type = other RNA
atgacagcggcacctacctctg

SEQ ID NO: 2342 - RNA, 22 nt, synthetic construct
  source 1..22: mol_type = other RNA
atgagccccagcaaccagacgg

SEQ ID NO: 2343 - RNA, 22 nt, synthetic construct
  source 1..22: mol_type = other RNA
atgagcgtggtcagggcccggc

SEQ ID NO: 2344 - RNA, 22 nt, synthetic construct
  source 1..22: mol_type = other RNA
atgcggtaccagtttagcacga

SEQ ID NO: 2345 - RNA, 22 nt, synthetic construct
  source 1..22: mol_type = other RNA
atggagagaggtgaggaagggg

SEQ ID NO: 2346 - RNA, 22 nt, synthetic construct
  source 1..22: mol_type = other RNA
atggccccacagaggtaggtgc

SEQ ID NO: 2347 - RNA, 22 nt, synthetic construct
  source 1..22: mol_type = other RNA
atgtggaagtcacgcccgttgg

SEQ ID NO: 2348 - RNA, 22 nt, synthetic construct
  source 1..22: mol_type = other RNA
atgtgttggagaagctgcaggt

SEQ ID NO: 2349 - RNA, 22 nt, synthetic construct
  source 1..22: mol_type = other RNA
attgcgccgggccctgaccacg

SEQ ID NO: 2350 - RNA, 22 nt, synthetic construct
  source 1..22: mol_type = other RNA
caaagagagcctgcgggcagag

SEQ ID NO: 2351 - RNA, 22 nt, synthetic construct
  source 1..22: mol_type = other RNA
caacacatcggagagcttcgtg

SEQ ID NO: 2352 - RNA, 22 nt, synthetic construct
  source 1..22: mol_type = other RNA
caaccagacggacaagctggcc

SEQ ID NO: 2353 - RNA, 22 nt, synthetic construct
  source 1..22: mol_type = other RNA
caacgccaccttcacctgcagc

SEQ ID NO: 2354 - RNA, 22 nt, synthetic construct
  source 1..22: mol_type = other RNA
caacgggcgtgacttccacatg

SEQ ID NO: 2355 - RNA, 22 nt, synthetic construct
  source 1..22: mol_type = other RNA
caactgcccaacgggcgtgact

SEQ ID NO: 2356 - RNA, 22 nt, synthetic construct
  source 1..22: mol_type = other RNA
caagctggccgccttccccgag

SEQ ID NO: 2357 - RNA, 22 nt, synthetic construct
  source 1..22: mol_type = other RNA
caaggcgcagatcaaagagagc

SEQ ID NO: 2358 - RNA, 22 nt, synthetic construct
  source 1..22: mol_type = other RNA
caatgacagcggcacctacctc

SEQ ID NO: 2359 - RNA, 22 nt, synthetic construct
  source 1..22: mol_type = other RNA
cacaactgcccaacgggcgtga

SEQ ID NO: 2360 - RNA, 22 nt, synthetic construct
  source 1..22: mol_type = other RNA
cacacaactgcccaacgggcgt

SEQ ID NO: 2361 - RNA, 22 nt, synthetic construct
  source 1..22: mol_type = other RNA
cacagaggtaggtgccgctgtc

SEQ ID NO: 2362 - RNA, 22 nt, synthetic construct
  source 1..22: mol_type = other RNA
cacatcggagagcttcgtgcta

SEQ ID NO: 2363 - RNA, 22 nt, synthetic construct
  source 1..22: mol_type = other RNA
cacatgagcgtggtcagggccc

SEQ ID NO: 2364 - RNA, 22 nt, synthetic construct
  source 1..22: mol_type = other RNA
caccacgagcagggctggggag

SEQ ID NO: 2365 - RNA, 22 nt, synthetic construct
  source 1..22: mol_type = other RNA
cacccagccccttcctcacctc

SEQ ID NO: 2366 - RNA, 22 nt, synthetic construct
  source 1..22: mol_type = other RNA
caccctgagctctgcccgcagg

SEQ ID NO: 2367 - RNA, 22 nt, synthetic construct
  source 1..22: mol_type = other RNA
cacctacctctgtggggccatc

SEQ ID NO: 2368 - RNA, 22 nt, synthetic construct
  source 1..22: mol_type = other RNA
cacctctctccatctctcagac

SEQ ID NO: 2369 - RNA, 22 nt, synthetic construct
  source 1..22: mol_type = other RNA
cacctgcagcttctccaacaca

SEQ ID NO: 2370 - RNA, 22 nt, synthetic construct
  source 1..22: mol_type = other RNA
cacctgtcaccctgagctctgc

SEQ ID NO: 2371 - RNA, 22 nt, synthetic construct
  source 1..22: mol_type = other RNA
caccttcacctgcagcttctcc

SEQ ID NO: 2372 - RNA, 22 nt, synthetic construct
  source 1..22: mol_type = other RNA
caccttctccccagccctgctc

SEQ ID NO: 2373 - RNA, 22 nt, synthetic construct
  source 1..22: mol_type = other RNA
cacgaagctctccgatgtgttg

SEQ ID NO: 2374 - RNA, 22 nt, synthetic construct
  source 1..22: mol_type = other RNA
cacgagcagggctggggagaag

SEQ ID NO: 2375 - RNA, 22 nt, synthetic construct
  source 1..22: mol_type = other RNA
cacgcccgttgggcagttgtgt

SEQ ID NO: 2376 - RNA, 22 nt, synthetic construct
  source 1..22: mol_type = other RNA
cacgctcatgtggaagtcacgc

SEQ ID NO: 2377 - RNA, 22 nt, synthetic construct
  source 1..22: mol_type = other RNA
cacggaagcggcagtcctggcc

SEQ ID NO: 2378 - RNA, 22 nt, synthetic construct
  source 1..22: mol_type = other RNA
cagacaggccctggaacccccc

SEQ ID NO: 2379 - RNA, 22 nt, synthetic construct
  source 1..22: mol_type = other RNA
cagacggacaagctggccgcct

SEQ ID NO: 2380 - RNA, 22 nt, synthetic construct
  source 1..22: mol_type = other RNA
cagactccccagacaggccctg

SEQ ID NO: 2381 - RNA, 22 nt, synthetic construct
  source 1..22: mol_type = other RNA
cagagctcagggtgacaggtgc

SEQ ID NO: 2382 - RNA, 22 nt, synthetic construct
  source 1..22: mol_type = other RNA
cagaggtaggtgccgctgtcat

SEQ ID NO: 2383 - RNA, 22 nt, synthetic construct
  source 1..22: mol_type = other RNA
cagatcaaagagagcctgcggg

SEQ ID NO: 2384 - RNA, 22 nt, synthetic construct
  source 1..22: mol_type = other RNA
cagcaaccagacggacaagctg

SEQ ID NO: 2385 - RNA, 22 nt, synthetic construct
  source 1..22: mol_type = other RNA
cagccagcccggccaggactgc

SEQ ID NO: 2386 - RNA, 22 nt, synthetic construct
  source 1..22: mol_type = other RNA
cagccccttcctcacctctctc

SEQ ID NO: 2387 - RNA, 22 nt, synthetic construct
  source 1..22: mol_type = other RNA
cagcccggccaggactgccgct

SEQ ID NO: 2388 - RNA, 22 nt, synthetic construct
  source 1..22: mol_type = other RNA
cagccctgctcgtggtgaccga

SEQ ID NO: 2389 - RNA, 22 nt, synthetic construct
  source 1..22: mol_type = other RNA
cagcggcacctacctctgtggg

SEQ ID NO: 2390 - RNA, 22 nt, synthetic construct
  source 1..22: mol_type = other RNA
cagcttctccaacacatcggag

SEQ ID NO: 2391 - RNA, 22 nt, synthetic construct
  source 1..22: mol_type = other RNA
cagcttgtccgtctggttgctg

SEQ ID NO: 2392 - RNA, 22 nt, synthetic construct
  source 1..22: mol_type = other RNA
caggactgccgcttccgtgtca

SEQ ID NO: 2393 - RNA, 22 nt, synthetic construct
  source 1..22: mol_type = other RNA
caggctctctttgatctgcgcc

SEQ ID NO: 2394 - RNA, 22 nt, synthetic construct
  source 1..22: mol_type = other RNA
cagggagatggccccacagagg

SEQ ID NO: 2395 - RNA, 22 nt, synthetic construct
  source 1..22: mol_type = other RNA
cagggcccggcgcaatgacagc

SEQ ID NO: 2396 - RNA, 22 nt, synthetic construct
  source 1..22: mol_type = other RNA
cagggcctgtctggggagtctg

SEQ ID NO: 2397 - RNA, 22 nt, synthetic construct
  source 1..22: mol_type = other RNA
cagggctggggagaaggtgggg

SEQ ID NO: 2398 - RNA, 22 nt, synthetic construct
  source 1..22: mol_type = other RNA
cagggtgacaggtgcggcctcg

SEQ ID NO: 2399 - RNA, 22 nt, synthetic construct
  source 1..22: mol_type = other RNA
caggtgaaggtggcgttgtccc

SEQ ID NO: 2400 - RNA, 22 nt, synthetic construct
  source 1..22: mol_type = other RNA
cagtcctggccgggctggctgc

SEQ ID NO: 2401 - RNA, 22 nt, synthetic construct
  source 1..22: mol_type = other RNA
cagttgtgtgacacggaagcgg

SEQ ID NO: 2402 - RNA, 22 nt, synthetic construct
  source 1..22: mol_type = other RNA
cagtttagcacgaagctctccg

SEQ ID NO: 2403 - RNA, 22 nt, synthetic construct
  source 1..22: mol_type = other RNA
catcggagagcttcgtgctaaa

SEQ ID NO: 2404 - RNA, 22 nt, synthetic construct
  source 1..22: mol_type = other RNA
catctccctggcccccaaggcg

SEQ ID NO: 2405 - RNA, 22 nt, synthetic construct
  source 1..22: mol_type = other RNA
catctctcagactccccagaca

SEQ ID NO: 2406 - RNA, 22 nt, synthetic construct
  source 1..22: mol_type = other RNA
catgagccccagcaaccagacg

SEQ ID NO: 2407 - RNA, 22 nt, synthetic construct
  source 1..22: mol_type = other RNA
catgagcgtggtcagggcccgg

SEQ ID NO: 2408 - RNA, 22 nt, synthetic construct
  source 1..22: mol_type = other RNA
catgcggtaccagtttagcacg

SEQ ID NO: 2409 - RNA, 22 nt, synthetic construct
  source 1..22: mol_type = other RNA
catgtggaagtcacgcccgttg

SEQ ID NO: 2410 - RNA, 22 nt, synthetic construct
  source 1..22: mol_type = other RNA
cattgcgccgggccctgaccac

SEQ ID NO: 2411 - RNA, 22 nt, synthetic construct
  source 1..22: mol_type = other RNA
ccaacacatcggagagcttcgt

SEQ ID NO: 2412 - RNA, 22 nt, synthetic construct
  source 1..22: mol_type = other RNA
ccaacgggcgtgacttccacat

SEQ ID NO: 2413 - RNA, 22 nt, synthetic construct
  source 1..22: mol_type = other RNA
ccaaggcgcagatcaaagagag

SEQ ID NO: 2414 - RNA, 22 nt, synthetic construct
  source 1..22: mol_type = other RNA
ccacagaggtaggtgccgctgt

SEQ ID NO: 2415 - RNA, 22 nt, synthetic construct
  source 1..22: mol_type = other RNA
ccacatgagcgtggtcagggcc

SEQ ID NO: 2416 - RNA, 22 nt, synthetic construct
  source 1..22: mol_type = other RNA
ccacccagccccttcctcacct

SEQ ID NO: 2417 - RNA, 22 nt, synthetic construct
  source 1..22: mol_type = other RNA
ccaccttcacctgcagcttctc

SEQ ID NO: 2418 - RNA, 22 nt, synthetic construct
  source 1..22: mol_type = other RNA
ccaccttctccccagccctgct

SEQ ID NO: 2419 - RNA, 22 nt, synthetic construct
  source 1..22: mol_type = other RNA
ccacgagcagggctggggagaa

SEQ ID NO: 2420 - RNA, 22 nt, synthetic construct
  source 1..22: mol_type = other RNA
ccacgctcatgtggaagtcacg

SEQ ID NO: 2421 - RNA, 22 nt, synthetic construct
  source 1..22: mol_type = other RNA
ccagacaggccctggaaccccc

SEQ ID NO: 2422 - RNA, 22 nt, synthetic construct
  source 1..22: mol_type = other RNA
ccagacggacaagctggccgcc

SEQ ID NO: 2423 - RNA, 22 nt, synthetic construct
  source 1..22: mol_type = other RNA
ccagcaaccagacggacaagct

SEQ ID NO: 2424 - RNA, 22 nt, synthetic construct
  source 1..22: mol_type = other RNA
ccagccccttcctcacctctct

SEQ ID NO: 2425 - RNA, 22 nt, synthetic construct
  source 1..22: mol_type = other RNA
ccagccctgctcgtggtgaccg

SEQ ID NO: 2426 - RNA, 22 nt, synthetic construct
  source 1..22: mol_type = other RNA
ccagcttgtccgtctggttgct

SEQ ID NO: 2427 - RNA, 22 nt, synthetic construct
  source 1..22: mol_type = other RNA
ccaggactgccgcttccgtgtc

SEQ ID NO: 2428 - RNA, 22 nt, synthetic construct
  source 1..22: mol_type = other RNA
ccagggagatggccccacagag

SEQ ID NO: 2429 - RNA, 22 nt, synthetic construct
  source 1..22: mol_type = other RNA
ccagggcctgtctggggagtct

SEQ ID NO: 2430 - RNA, 22 nt, synthetic construct
  source 1..22: mol_type = other RNA
ccagtttagcacgaagctctcc

SEQ ID NO: 2431 - RNA, 22 nt, synthetic construct
  source 1..22: mol_type = other RNA
ccatctccctggcccccaaggc

SEQ ID NO: 2432 - RNA, 22 nt, synthetic construct
  source 1..22: mol_type = other RNA
ccatctctcagactccccagac

SEQ ID NO: 2433 - RNA, 22 nt, synthetic construct
  source 1..22: mol_type = other RNA
cccaacgggcgtgacttccaca

SEQ ID NO: 2434 - RNA, 22 nt, synthetic construct
  source 1..22: mol_type = other RNA
cccaaggcgcagatcaaagaga

SEQ ID NO: 2435 - RNA, 22 nt, synthetic construct
  source 1..22: mol_type = other RNA
cccacagaggtaggtgccgctg

SEQ ID NO: 2436 - RNA, 22 nt, synthetic construct
  source 1..22: mol_type = other RNA
cccaccttctccccagccctgc

SEQ ID NO: 2437 - RNA, 22 nt, synthetic construct
  source 1..22: mol_type = other RNA
cccagacaggccctggaacccc

SEQ ID NO: 2438 - RNA, 22 nt, synthetic construct
  source 1..22: mol_type = other RNA
cccagcaaccagacggacaagc

SEQ ID NO: 2439 - RNA, 22 nt, synthetic construct
  source 1..22: mol_type = other RNA
cccagccccttcctcacctctc

SEQ ID NO: 2440 - RNA, 22 nt, synthetic construct
  source 1..22: mol_type = other RNA
cccagccctgctcgtggtgacc

SEQ ID NO: 2441 - RNA, 22 nt, synthetic construct
  source 1..22: mol_type = other RNA
ccccaaggcgcagatcaaagag

SEQ ID NO: 2442 - RNA, 22 nt, synthetic construct
  source 1..22: mol_type = other RNA
ccccacagaggtaggtgccgct

SEQ ID NO: 2443 - RNA, 22 nt, synthetic construct
  source 1..22: mol_type = other RNA
ccccaccttctccccagccctg

SEQ ID NO: 2444 - RNA, 22 nt, synthetic construct
  source 1..22: mol_type = other RNA
ccccagacaggccctggaaccc

SEQ ID NO: 2445 - RNA, 22 nt, synthetic construct
  source 1..22: mol_type = other RNA
ccccagcaaccagacggacaag

SEQ ID NO: 2446 - RNA, 22 nt, synthetic construct
  source 1..22: mol_type = other RNA
ccccagccctgctcgtggtgac

SEQ ID NO: 2447 - RNA, 22 nt, synthetic construct
  source 1..22: mol_type = other RNA
cccccaaggcgcagatcaaaga

SEQ ID NO: 2448 - RNA, 22 nt, synthetic construct
  source 1..22: mol_type = other RNA
cccccaccttctccccagccct

SEQ ID NO: 2449 - RNA, 22 nt, synthetic construct
  source 1..22: mol_type = other RNA
ccccccaccttctccccagccc

SEQ ID NO: 2450 - RNA, 22 nt, synthetic construct
  source 1..22: mol_type = other RNA
ccccttcctcacctctctccat

SEQ ID NO: 2451 - RNA, 22 nt, synthetic construct
  source 1..22: mol_type = other RNA
ccccttcggtcaccacgagcag

SEQ ID NO: 2452 - RNA, 22 nt, synthetic construct
  source 1..22: mol_type = other RNA
cccgcaggctctctttgatctg

SEQ ID NO: 2453 - RNA, 22 nt, synthetic construct
  source 1..22: mol_type = other RNA
cccggccaggactgccgcttcc

SEQ ID NO: 2454 - RNA, 22 nt, synthetic construct
  source 1..22: mol_type = other RNA
cccggcgcaatgacagcggcac

SEQ ID NO: 2455 - RNA, 22 nt, synthetic construct
  source 1..22: mol_type = other RNA
cccgttgggcagttgtgtgaca

SEQ ID NO: 2456 - RNA, 22 nt, synthetic construct
  source 1..22: mol_type = other RNA
ccctgaccacgctcatgtggaa

SEQ ID NO: 2457 - RNA, 22 nt, synthetic construct
  source 1..22: mol_type = other RNA
ccctgagctctgcccgcaggct

SEQ ID NO: 2458 - RNA, 22 nt, synthetic construct
  source 1..22: mol_type = other RNA
ccctgctcgtggtgaccgaagg

SEQ ID NO: 2459 - RNA, 22 nt, synthetic construct
  source 1..22: mol_type = other RNA
ccctggcccccaaggcgcagat

SEQ ID NO: 2460 - RNA, 22 nt, synthetic construct
  source 1..22: mol_type = other RNA
cccttcctcacctctctccatc

SEQ ID NO: 2461 - RNA, 22 nt, synthetic construct
  source 1..22: mol_type = other RNA
cccttcggtcaccacgagcagg

SEQ ID NO: 2462 - RNA, 22 nt, synthetic construct
  source 1..22: mol_type = other RNA
ccgaaggggacaacgccacctt

SEQ ID NO: 2463 - RNA, 22 nt, synthetic construct
  source 1..22: mol_type = other RNA
ccgaggccgcacctgtcaccct

SEQ ID NO: 2464 - RNA, 22 nt, synthetic construct
  source 1..22: mol_type = other RNA
ccgatgtgttggagaagctgca

SEQ ID NO: 2465 - RNA, 22 nt, synthetic construct
  source 1..22: mol_type = other RNA
ccgcacctgtcaccctgagctc

SEQ ID NO: 2466 - RNA, 22 nt, synthetic construct
  source 1..22: mol_type = other RNA
ccgcaggctctctttgatctgc

SEQ ID NO: 2467 - RNA, 22 nt, synthetic construct
  source 1..22: mol_type = other RNA
ccgcatgagccccagcaaccag

SEQ ID NO: 2468 - RNA, 22 nt, synthetic construct
  source 1..22: mol_type = other RNA
ccgccttccccgaggaccgcag

SEQ ID NO: 2469 - RNA, 22 nt, synthetic construct
  source 1..22: mol_type = other RNA
ccgctgtcattgcgccgggccc

SEQ ID NO: 2470 - RNA, 22 nt, synthetic construct
  source 1..22: mol_type = other RNA
ccgcttccgtgtcacacaactg

SEQ ID NO: 2471 - RNA, 22 nt, synthetic construct
  source 1..22: mol_type = other RNA
ccggccaggactgccgcttccg

SEQ ID NO: 2472 - RNA, 22 nt, synthetic construct
  source 1..22: mol_type = other RNA
ccggcgcaatgacagcggcacc

SEQ ID NO: 2473 - RNA, 22 nt, synthetic construct
  source 1..22: mol_type = other RNA
ccgggccctgaccacgctcatg

SEQ ID NO: 2474 - RNA, 22 nt, synthetic construct
  source 1..22: mol_type = other RNA
ccgtctggttgctggggctcat

SEQ ID NO: 2475 - RNA, 22 nt, synthetic construct
  source 1..22: mol_type = other RNA
ccgtgtcacacaactgcccaac

SEQ ID NO: 2476 - RNA, 22 nt, synthetic construct
  source 1..22: mol_type = other RNA
ccgttgggcagttgtgtgacac

SEQ ID NO: 2477 - RNA, 22 nt, synthetic construct
  source 1..22: mol_type = other RNA
cctacctctgtggggccatctc

SEQ ID NO: 2478 - RNA, 22 nt, synthetic construct
  source 1..22: mol_type = other RNA
cctcacctctctccatctctca

SEQ ID NO: 2479 - RNA, 22 nt, synthetic construct
  source 1..22: mol_type = other RNA
cctccgaggccgcacctgtcac

SEQ ID NO: 2480 - RNA, 22 nt, synthetic construct
  source 1..22: mol_type = other RNA
cctcggggaaggcggccagctt

SEQ ID NO: 2481 - RNA, 22 nt, synthetic construct
  source 1..22: mol_type = other RNA
cctctctccatctctcagactc

SEQ ID NO: 2482 - RNA, 22 nt, synthetic construct
  source 1..22: mol_type = other RNA
cctctgtggggccatctccctg

SEQ ID NO: 2483 - RNA, 22 nt, synthetic construct
  source 1..22: mol_type = other RNA
cctgaccacgctcatgtggaag

SEQ ID NO: 2484 - RNA, 22 nt, synthetic construct
  source 1..22: mol_type = other RNA
cctgagctctgcccgcaggctc

SEQ ID NO: 2485 - RNA, 22 nt, synthetic construct
  source 1..22: mol_type = other RNA
cctgcagcttctccaacacatc

SEQ ID NO: 2486 - RNA, 22 nt, synthetic construct
  source 1..22: mol_type = other RNA
cctgcgggcagagctcagggtg

SEQ ID NO: 2487 - RNA, 22 nt, synthetic construct
  source 1..22: mol_type = other RNA
cctgctcgtggtgaccgaaggg

SEQ ID NO: 2488 - RNA, 22 nt, synthetic construct
  source 1..22: mol_type = other RNA
cctggcccccaaggcgcagatc

SEQ ID NO: 2489 - RNA, 22 nt, synthetic construct
  source 1..22: mol_type = other RNA
cctgtcaccctgagctctgccc

SEQ ID NO: 2490 - RNA, 22 nt, synthetic construct
  source 1..22: mol_type = other RNA
cctgtctggggagtctgagaga

SEQ ID NO: 2491 - RNA, 22 nt, synthetic construct
  source 1..22: mol_type = other RNA
ccttcacctgcagcttctccaa

SEQ ID NO: 2492 - RNA, 22 nt, synthetic construct
  source 1..22: mol_type = other RNA
ccttccccgaggaccgcagcca

SEQ ID NO: 2493 - RNA, 22 nt, synthetic construct
  source 1..22: mol_type = other RNA
ccttcctcacctctctccatct

SEQ ID NO: 2494 - RNA, 22 nt, synthetic construct
  source 1..22: mol_type = other RNA
ccttcggtcaccacgagcaggg

SEQ ID NO: 2495 - RNA, 22 nt, synthetic construct
  source 1..22: mol_type = other RNA
ccttctccccagccctgctcgt

SEQ ID NO: 2496 - RNA, 22 nt, synthetic construct
  source 1..22: mol_type = other RNA
ccttgggggccagggagatggc

SEQ ID NO: 2497 - RNA, 22 nt, synthetic construct
  source 1..22: mol_type = other RNA
cgaagctctccgatgtgttgga

SEQ ID NO: 2498 - RNA, 22 nt, synthetic construct
  source 1..22: mol_type = other RNA
cgaaggggacaacgccaccttc

SEQ ID NO: 2499 - RNA, 22 nt, synthetic construct
  source 1..22: mol_type = other RNA
cgagcagggctggggagaaggt

SEQ ID NO: 2500 - RNA, 22 nt, synthetic construct
  source 1..22: mol_type = other RNA
cgaggccgcacctgtcaccctg

SEQ ID NO: 2501 - RNA, 22 nt, synthetic construct
  source 1..22: mol_type = other RNA
cgatgtgttggagaagctgcag

SEQ ID NO: 2502 - RNA, 22 nt, synthetic construct
  source 1..22: mol_type = other RNA
cgcaatgacagcggcacctacc

SEQ ID NO: 2503 - RNA, 22 nt, synthetic construct
  source 1..22: mol_type = other RNA
cgcacctgtcaccctgagctct

SEQ ID NO: 2504 - RNA, 22 nt, synthetic construct
  source 1..22: mol_type = other RNA
cgcagatcaaagagagcctgcg

SEQ ID NO: 2505 - RNA, 22 nt, synthetic construct
  source 1..22: mol_type = other RNA
cgcagccagcccggccaggact

SEQ ID NO: 2506 - RNA, 22 nt, synthetic construct
  source 1..22: mol_type = other RNA
cgcaggctctctttgatctgcg

SEQ ID NO: 2507 - RNA, 22 nt, synthetic construct
  source 1..22: mol_type = other RNA
cgcatgagccccagcaaccaga

SEQ ID NO: 2508 - RNA, 22 nt, synthetic construct
  source 1..22: mol_type = other RNA
cgccaccttcacctgcagcttc

SEQ ID NO: 2509 - RNA, 22 nt, synthetic construct
  source 1..22: mol_type = other RNA
cgcccgttgggcagttgtgtga

SEQ ID NO: 2510 - RNA, 22 nt, synthetic construct
  source 1..22: mol_type = other RNA
cgccgggccctgaccacgctca

SEQ ID NO: 2511 - RNA, 22 nt, synthetic construct
  source 1..22: mol_type = other RNA
cgccttccccgaggaccgcagc

SEQ ID NO: 2512 - RNA, 22 nt, synthetic construct
  source 1..22: mol_type = other RNA
cgccttgggggccagggagatg

SEQ ID NO: 2513 - RNA, 22 nt, synthetic construct
  source 1..22: mol_type = other RNA
cgctcatgtggaagtcacgccc

SEQ ID NO: 2514 - RNA, 22 nt, synthetic construct
  source 1..22: mol_type = other RNA
cgctgtcattgcgccgggccct

SEQ ID NO: 2515 - RNA, 22 nt, synthetic construct
  source 1..22: mol_type = other RNA
cgcttccgtgtcacacaactgc

SEQ ID NO: 2516 - RNA, 22 nt, synthetic construct
  source 1..22: mol_type = other RNA
cggaagcggcagtcctggccgg

SEQ ID NO: 2517 - RNA, 22 nt, synthetic construct
  source 1..22: mol_type = other RNA
cggacaagctggccgccttccc

SEQ ID NO: 2518 - RNA, 22 nt, synthetic construct
  source 1..22: mol_type = other RNA
cggagagcttcgtgctaaactg

SEQ ID NO: 2519 - RNA, 22 nt, synthetic construct
  source 1..22: mol_type = other RNA
cggcacctacctctgtggggcc

SEQ ID NO: 2520 - RNA, 22 nt, synthetic construct
  source 1..22: mol_type = other RNA
cggccagcttgtccgtctggtt

SEQ ID NO: 2521 - RNA, 22 nt, synthetic construct
  source 1..22: mol_type = other RNA
cggccaggactgccgcttccgt

SEQ ID NO: 2522 - RNA, 22 nt, synthetic construct
  source 1..22: mol_type = other RNA
cggcgcaatgacagcggcacct

SEQ ID NO: 2523 - RNA, 22 nt, synthetic construct
  source 1..22: mol_type = other RNA
cgggcagagctcagggtgacag

SEQ ID NO: 2524 - RNA, 22 nt, synthetic construct
  source 1..22: mol_type = other RNA
cgggccctgaccacgctcatgt

SEQ ID NO: 2525 - RNA, 22 nt, synthetic construct
  source 1..22: mol_type = other RNA
cgggcgtgacttccacatgagc

SEQ ID NO: 2526 - RNA, 22 nt, synthetic construct
  source 1..22: mol_type = other RNA
cggggaaggcggccagcttgtc

SEQ ID NO: 2527 - RNA, 22 nt, synthetic construct
  source 1..22: mol_type = other RNA
cggtaccagtttagcacgaagc

SEQ ID NO: 2528 - RNA, 22 nt, synthetic construct
  source 1..22: mol_type = other RNA
cggtcaccacgagcagggctgg

SEQ ID NO: 2529 - RNA, 22 nt, synthetic construct
  source 1..22: mol_type = other RNA
cggtcctcggggaaggcggcca

SEQ ID NO: 2530 - RNA, 22 nt, synthetic construct
  source 1..22: mol_type = other RNA
cgtctggttgctggggctcatg

SEQ ID NO: 2531 - RNA, 22 nt, synthetic construct
  source 1..22: mol_type = other RNA
cgtgacttccacatgagcgtgg

SEQ ID NO: 2532 - RNA, 22 nt, synthetic construct
  source 1..22: mol_type = other RNA
cgtgctaaactggtaccgcatg

SEQ ID NO: 2533 - RNA, 22 nt, synthetic construct
  source 1..22: mol_type = other RNA
cgtggtcagggcccggcgcaat

SEQ ID NO: 2534 - RNA, 22 nt, synthetic construct
  source 1..22: mol_type = other RNA
cgtggtgaccgaaggggacaac

SEQ ID NO: 2535 - RNA, 22 nt, synthetic construct
  source 1..22: mol_type = other RNA
cgtgtcacacaactgcccaacg

SEQ ID NO: 2536 - RNA, 22 nt, synthetic construct
  source 1..22: mol_type = other RNA
cgttgggcagttgtgtgacacg

SEQ ID NO: 2537 - RNA, 22 nt, synthetic construct
  source 1..22: mol_type = other RNA
cgttgtccccttcggtcaccac

SEQ ID NO: 2538 - RNA, 22 nt, synthetic construct
  source 1..22: mol_type = other RNA
ctaaactggtaccgcatgagcc

SEQ ID NO: 2539 - RNA, 22 nt, synthetic construct
  source 1..22: mol_type = other RNA
ctacctctgtggggccatctcc

SEQ ID NO: 2540 - RNA, 22 nt, synthetic construct
  source 1..22: mol_type = other RNA
ctcacctctctccatctctcag

SEQ ID NO: 2541 - RNA, 22 nt, synthetic construct
  source 1..22: mol_type = other RNA
ctcagactccccagacaggccc

SEQ ID NO: 2542 - RNA, 22 nt, synthetic construct
  source 1..22: mol_type = other RNA
ctcagctcacccctgccccggg

SEQ ID NO: 2543 - RNA, 22 nt, synthetic construct
  source 1..22: mol_type = other RNA
ctcagggtgacaggtgcggcct

SEQ ID NO: 2544 - RNA, 22 nt, synthetic construct
  source 1..22: mol_type = other RNA
ctcatgcggtaccagtttagca

SEQ ID NO: 2545 - RNA, 22 nt, synthetic construct
  source 1..22: mol_type = other RNA
ctcatgtggaagtcacgcccgt

SEQ ID NO: 2546 - RNA, 22 nt, synthetic construct
  source 1..22: mol_type = other RNA
ctccaacacatcggagagcttc

SEQ ID NO: 2547 - RNA, 22 nt, synthetic construct
  source 1..22: mol_type = other RNA
ctccatctctcagactccccag

SEQ ID NO: 2548 - RNA, 22 nt, synthetic construct
  source 1..22: mol_type = other RNA
ctccccagacaggccctggaac

SEQ ID NO: 2549 - RNA, 22 nt, synthetic construct
  source 1..22: mol_type = other RNA
ctccccagccctgctcgtggtg

SEQ ID NO: 2550 - RNA, 22 nt, synthetic construct
  source 1..22: mol_type = other RNA
ctccctggcccccaaggcgcag

SEQ ID NO: 2551 - RNA, 22 nt, synthetic construct
  source 1..22: mol_type = other RNA
ctccgaggccgcacctgtcacc

SEQ ID NO: 2552 - RNA, 22 nt, synthetic construct
  source 1..22: mol_type = other RNA
ctccgatgtgttggagaagctg

SEQ ID NO: 2553 - RNA, 22 nt, synthetic construct
  source 1..22: mol_type = other RNA
ctcggggaaggcggccagcttg

SEQ ID NO: 2554 - RNA, 22 nt, synthetic construct
  source 1..22: mol_type = other RNA
ctcgtggtgaccgaaggggaca

SEQ ID NO: 2555 - RNA, 22 nt, synthetic construct
  source 1..22: mol_type = other RNA
ctctcagactccccagacaggc

SEQ ID NO: 2556 - RNA, 22 nt, synthetic construct
  source 1..22: mol_type = other RNA
ctctccatctctcagactcccc

SEQ ID NO: 2557 - RNA, 22 nt, synthetic construct
  source 1..22: mol_type = other RNA
ctctccgatgtgttggagaagc

SEQ ID NO: 2558 - RNA, 22 nt, synthetic construct
  source 1..22: mol_type = other RNA
ctctctccatctctcagactcc

SEQ ID NO: 2559 - RNA, 22 nt, synthetic construct
  source 1..22: mol_type = other RNA
ctctctttgatctgcgccttgg

SEQ ID NO: 2560 - RNA, 22 nt, synthetic construct
  source 1..22: mol_type = other RNA
ctctgcccgcaggctctctttg

SEQ ID NO: 2561 - RNA, 22 nt, synthetic construct
  source 1..22: mol_type = other RNA
ctctgtggggccatctccctgg

SEQ ID NO: 2562 - RNA, 22 nt, synthetic construct
  source 1..22: mol_type = other RNA
ctctttgatctgcgccttgggg

SEQ ID NO: 2563 - RNA, 22 nt, synthetic construct
  source 1..22: mol_type = other RNA
ctgaccacgctcatgtggaagt

SEQ ID NO: 2564 - RNA, 22 nt, synthetic construct
  source 1..22: mol_type = other RNA
ctgagagatggagagaggtgag

SEQ ID NO: 2565 - RNA, 22 nt, synthetic construct
  source 1..22: mol_type = other RNA
ctgagctctgcccgcaggctct

SEQ ID NO: 2566 - RNA, 22 nt, synthetic construct
  source 1..22: mol_type = other RNA
ctgcagcttctccaacacatcg

SEQ ID NO: 2567 - RNA, 22 nt, synthetic construct
  source 1..22: mol_type = other RNA
ctgcaggtgaaggtggcgttgt

SEQ ID NO: 2568 - RNA, 22 nt, synthetic construct
  source 1..22: mol_type = other RNA
ctgcccaacgggcgtgacttcc

SEQ ID NO: 2569 - RNA, 22 nt, synthetic construct
  source 1..22: mol_type = other RNA
ctgcccgcaggctctctttgat

SEQ ID NO: 2570 - RNA, 22 nt, synthetic construct
  source 1..22: mol_type = other RNA
ctgccgcttccgtgtcacacaa

SEQ ID NO: 2571 - RNA, 22 nt, synthetic construct
  source 1..22: mol_type = other RNA
ctgcgccttgggggccagggag

SEQ ID NO: 2572 - RNA, 22 nt, synthetic construct
  source 1..22: mol_type = other RNA
ctgcgggcagagctcagggtga

SEQ ID NO: 2573 - RNA, 22 nt, synthetic construct
  source 1..22: mol_type = other RNA
ctgcggtcctcggggaaggcgg

SEQ ID NO: 2574 - RNA, 22 nt, synthetic construct
  source 1..22: mol_type = other RNA
ctgctcgtggtgaccgaagggg

SEQ ID NO: 2575 - RNA, 22 nt, synthetic construct
  source 1..22: mol_type = other RNA
ctggcccccaaggcgcagatca

SEQ ID NO: 2576 - RNA, 22 nt, synthetic construct
  source 1..22: mol_type = other RNA
ctggccgccttccccgaggacc

SEQ ID NO: 2577 - RNA, 22 nt, synthetic construct
  source 1..22: mol_type = other RNA
ctggctgcggtcctcggggaag

SEQ ID NO: 2578 - RNA, 22 nt, synthetic construct
  source 1..22: mol_type = other RNA
ctggggagtctgagagatggag

SEQ ID NO: 2579 - RNA, 22 nt, synthetic construct
  source 1..22: mol_type = other RNA
ctggggctcatgcggtaccagt

SEQ ID NO: 2580 - RNA, 22 nt, synthetic construct
  source 1..22: mol_type = other RNA
ctggtaccgcatgagccccagc

SEQ ID NO: 2581 - RNA, 22 nt, synthetic construct
  source 1..22: mol_type = other RNA
ctggttgctggggctcatgcgg

SEQ ID NO: 2582 - RNA, 22 nt, synthetic construct
  source 1..22: mol_type = other RNA
ctgtcaccctgagctctgcccg

SEQ ID NO: 2583 - RNA, 22 nt, synthetic construct
  source 1..22: mol_type = other RNA
ctgtcattgcgccgggccctga

SEQ ID NO: 2584 - RNA, 22 nt, synthetic construct
  source 1..22: mol_type = other RNA
ctgtctggggagtctgagagat

SEQ ID NO: 2585 - RNA, 22 nt, synthetic construct
  source 1..22: mol_type = other RNA
ctgtggggccatctccctggcc

SEQ ID NO: 2586 - RNA, 22 nt, synthetic construct
  source 1..22: mol_type = other RNA
cttcacctgcagcttctccaac

SEQ ID NO: 2587 - RNA, 22 nt, synthetic construct
  source 1..22: mol_type = other RNA
cttccacatgagcgtggtcagg

SEQ ID NO: 2588 - RNA, 22 nt, synthetic construct
  source 1..22: mol_type = other RNA
cttccccgaggaccgcagccag

SEQ ID NO: 2589 - RNA, 22 nt, synthetic construct
  source 1..22: mol_type = other RNA
cttccgtgtcacacaactgccc

SEQ ID NO: 2590 - RNA, 22 nt, synthetic construct
  source 1..22: mol_type = other RNA
cttcctcacctctctccatctc

SEQ ID NO: 2591 - RNA, 22 nt, synthetic construct
  source 1..22: mol_type = other RNA
cttcggtcaccacgagcagggc

SEQ ID NO: 2592 - RNA, 22 nt, synthetic construct
  source 1..22: mol_type = other RNA
cttcgtgctaaactggtaccgc

SEQ ID NO: 2593 - RNA, 22 nt, synthetic construct
  source 1..22: mol_type = other RNA
cttctccaacacatcggagagc

SEQ ID NO: 2594 - RNA, 22 nt, synthetic construct
  source 1..22: mol_type = other RNA
cttctccccagccctgctcgtg

SEQ ID NO: 2595 - RNA, 22 nt, synthetic construct
  source 1..22: mol_type = other RNA
cttgggggccagggagatggcc

SEQ ID NO: 2596 - RNA, 22 nt, synthetic construct
  source 1..22: mol_type = other RNA
cttgtccgtctggttgctgggg

SEQ ID NO: 2597 - RNA, 22 nt, synthetic construct
  source 1..22: mol_type = other RNA
ctttgatctgcgccttgggggc

SEQ ID NO: 2598 - RNA, 22 nt, synthetic construct
  source 1..22: mol_type = other RNA
gaagcggcagtcctggccgggc

SEQ ID NO: 2599 - RNA, 22 nt, synthetic construct
  source 1..22: mol_type = other RNA
gaagctctccgatgtgttggag

SEQ ID NO: 2600 - RNA, 22 nt, synthetic construct
  source 1..22: mol_type = other RNA
gaagctgcaggtgaaggtggcg

SEQ ID NO: 2601 - RNA, 22 nt, synthetic construct
  source 1..22: mol_type = other RNA
gaaggcggccagcttgtccgtc

SEQ ID NO: 2602 - RNA, 22 nt, synthetic construct
  source 1..22: mol_type = other RNA
gaaggggacaacgccaccttca

SEQ ID NO: 2603 - RNA, 22 nt, synthetic construct
  source 1..22: mol_type = other RNA
gaaggtggcgttgtccccttcg

SEQ ID NO: 2604 - RNA, 22 nt, synthetic construct
  source 1..22: mol_type = other RNA
gaagtcacgcccgttgggcagt

SEQ ID NO: 2605 - RNA, 22 nt, synthetic construct
  source 1..22: mol_type = other RNA
gacaacgccaccttcacctgca

SEQ ID NO: 2606 - RNA, 22 nt, synthetic construct
  source 1..22: mol_type = other RNA
gacaagctggccgccttccccg

SEQ ID NO: 2607 - RNA, 22 nt, synthetic construct
  source 1..22: mol_type = other RNA
gacacggaagcggcagtcctgg

SEQ ID NO: 2608 - RNA, 22 nt, synthetic construct
  source 1..22: mol_type = other RNA
gacagcggcacctacctctgtg

SEQ ID NO: 2609 - RNA, 22 nt, synthetic construct
  source 1..22: mol_type = other RNA
gacaggtgcggcctcggaggcc

SEQ ID NO: 2610 - RNA, 22 nt, synthetic construct
  source 1..22: mol_type = other RNA
gaccacgctcatgtggaagtca

SEQ ID NO: 2611 - RNA, 22 nt, synthetic construct
  source 1..22: mol_type = other RNA
gaccgaaggggacaacgccacc

SEQ ID NO: 2612 - RNA, 22 nt, synthetic construct
  source 1..22: mol_type = other RNA
gacggacaagctggccgccttc

SEQ ID NO: 2613 - RNA, 22 nt, synthetic construct
  source 1..22: mol_type = other RNA
gactccccagacaggccctgga

SEQ ID NO: 2614 - RNA, 22 nt, synthetic construct
  source 1..22: mol_type = other RNA
gactgccgcttccgtgtcacac

SEQ ID NO: 2615 - RNA, 22 nt, synthetic construct
  source 1..22: mol_type = other RNA
gacttccacatgagcgtggtca

SEQ ID NO: 2616 - RNA, 22 nt, synthetic construct
  source 1..22: mol_type = other RNA
gagaagctgcaggtgaaggtgg

SEQ ID NO: 2617 - RNA, 22 nt, synthetic construct
  source 1..22: mol_type = other RNA
gagagatggagagaggtgagga

SEQ ID NO: 2618 - RNA, 22 nt, synthetic construct
  source 1..22: mol_type = other RNA
gagagcctgcgggcagagctca

SEQ ID NO: 2619 - RNA, 22 nt, synthetic construct
  source 1..22: mol_type = other RNA
gagagcttcgtgctaaactggt

SEQ ID NO: 2620 - RNA, 22 nt, synthetic construct
  source 1..22: mol_type = other RNA
gagatggagagaggtgaggaag

SEQ ID NO: 2621 - RNA, 22 nt, synthetic construct
  source 1..22: mol_type = other RNA
gagatggccccacagaggtagg

SEQ ID NO: 2622 - RNA, 22 nt, synthetic construct
  source 1..22: mol_type = other RNA
gagcagggctggggagaaggtg

SEQ ID NO: 2623 - RNA, 22 nt, synthetic construct
  source 1..22: mol_type = other RNA
gagccccagcaaccagacggac

SEQ ID NO: 2624 - RNA, 22 nt, synthetic construct
  source 1..22: mol_type = other RNA
gagcctgcgggcagagctcagg

SEQ ID NO: 2625 - RNA, 22 nt, synthetic construct
  source 1..22: mol_type = other RNA
gagctcagggtgacaggtgcgg

SEQ ID NO: 2626 - RNA, 22 nt, synthetic construct
  source 1..22: mol_type = other RNA
gagctctgcccgcaggctctct

SEQ ID NO: 2627 - RNA, 22 nt, synthetic construct
  source 1..22: mol_type = other RNA
gagcttcgtgctaaactggtac

SEQ ID NO: 2628 - RNA, 22 nt, synthetic construct
  source 1..22: mol_type = other RNA
gaggccgcacctgtcaccctga

SEQ ID NO: 2629 - RNA, 22 nt, synthetic construct
  source 1..22: mol_type = other RNA
gaggtaggtgccgctgtcattg

SEQ ID NO: 2630 - RNA, 22 nt, synthetic construct
  source 1..22: mol_type = other RNA
gagtctgagagatggagagagg

SEQ ID NO: 2631 - RNA, 22 nt, synthetic construct
  source 1..22: mol_type = other RNA
gatcaaagagagcctgcgggca

SEQ ID NO: 2632 - RNA, 22 nt, synthetic construct
  source 1..22: mol_type = other RNA
gatctgcgccttgggggccagg

SEQ ID NO: 2633 - RNA, 22 nt, synthetic construct
  source 1..22: mol_type = other RNA
gatggagagaggtgaggaaggg

SEQ ID NO: 2634 - RNA, 22 nt, synthetic construct
  source 1..22: mol_type = other RNA
gatggccccacagaggtaggtg

SEQ ID NO: 2635 - RNA, 22 nt, synthetic construct
  source 1..22: mol_type = other RNA
gatgtgttggagaagctgcagg

SEQ ID NO: 2636 - RNA, 22 nt, synthetic construct
  source 1..22: mol_type = other RNA
gcaaccagacggacaagctggc

SEQ ID NO: 2637 - RNA, 22 nt, synthetic construct
  source 1..22: mol_type = other RNA
gcaatgacagcggcacctacct

SEQ ID NO: 2638 - RNA, 22 nt, synthetic construct
  source 1..22: mol_type = other RNA
gcacctacctctgtggggccat

SEQ ID NO: 2639 - RNA, 22 nt, synthetic construct
  source 1..22: mol_type = other RNA
gcacctgtcaccctgagctctg

SEQ ID NO: 2640 - RNA, 22 nt, synthetic construct
  source 1..22: mol_type = other RNA
gcacgaagctctccgatgtgtt

SEQ ID NO: 2641 - RNA, 22 nt, synthetic construct
  source 1..22: mol_type = other RNA
gcagagctcagggtgacaggtg

SEQ ID NO: 2642 - RNA, 22 nt, synthetic construct
  source 1..22: mol_type = other RNA
gcagatcaaagagagcctgcgg

SEQ ID NO: 2643 - RNA, 22 nt, synthetic construct
  source 1..22: mol_type = other RNA
gcagccagcccggccaggactg

SEQ ID NO: 2644 - RNA, 22 nt, synthetic construct
  source 1..22: mol_type = other RNA
gcagcttctccaacacatcgga

SEQ ID NO: 2645 - RNA, 22 nt, synthetic construct
  source 1..22: mol_type = other RNA
gcaggctctctttgatctgcgc

SEQ ID NO: 2646 - RNA, 22 nt, synthetic construct
  source 1..22: mol_type = other RNA
gcagggctggggagaaggtggg

SEQ ID NO: 2647 - RNA, 22 nt, synthetic construct
  source 1..22: mol_type = other RNA
gcaggtgaaggtggcgttgtcc

SEQ ID NO: 2648 - RNA, 22 nt, synthetic construct
  source 1..22: mol_type = other RNA
gcagtcctggccgggctggctg

SEQ ID NO: 2649 - RNA, 22 nt, synthetic construct
  source 1..22: mol_type = other RNA
gcagttgtgtgacacggaagcg

SEQ ID NO: 2650 - RNA, 22 nt, synthetic construct
  source 1..22: mol_type = other RNA
gcatgagccccagcaaccagac

SEQ ID NO: 2651 - RNA, 22 nt, synthetic construct
  source 1..22: mol_type = other RNA
gccacccagccccttcctcacc

SEQ ID NO: 2652 - RNA, 22 nt, synthetic construct
  source 1..22: mol_type = other RNA
gccaccttcacctgcagcttct

SEQ ID NO: 2653 - RNA, 22 nt, synthetic construct
  source 1..22: mol_type = other RNA
gccagcttgtccgtctggttgc

SEQ ID NO: 2654 - RNA, 22 nt, synthetic construct
  source 1..22: mol_type = other RNA
gccaggactgccgcttccgtgt

SEQ ID NO: 2655 - RNA, 22 nt, synthetic construct
  source 1..22: mol_type = other RNA
gccagggagatggccccacaga

SEQ ID NO: 2656 - RNA, 22 nt, synthetic construct
  source 1..22: mol_type = other RNA
gccatctccctggcccccaagg

SEQ ID NO: 2657 - RNA, 22 nt, synthetic construct
  source 1..22: mol_type = other RNA
gcccaacgggcgtgacttccac

SEQ ID NO: 2658 - RNA, 22 nt, synthetic construct
  source 1..22: mol_type = other RNA
gccccacagaggtaggtgccgc

SEQ ID NO: 2659 - RNA, 22 nt, synthetic construct
  source 1..22: mol_type = other RNA
gccccagcaaccagacggacaa

SEQ ID NO: 2660 - RNA, 22 nt, synthetic construct
  source 1..22: mol_type = other RNA
gcccccaaggcgcagatcaaag

SEQ ID NO: 2661 - RNA, 22 nt, synthetic construct
  source 1..22: mol_type = other RNA
gccccttcctcacctctctcca

SEQ ID NO: 2662 - RNA, 22 nt, synthetic construct
  source 1..22: mol_type = other RNA
gcccgcaggctctctttgatct

SEQ ID NO: 2663 - RNA, 22 nt, synthetic construct
  source 1..22: mol_type = other RNA
gcccggccaggactgccgcttc

SEQ ID NO: 2664 - RNA, 22 nt, synthetic construct
  source 1..22: mol_type = other RNA
gcccggcgcaatgacagcggca

SEQ ID NO: 2665 - RNA, 22 nt, synthetic construct
  source 1..22: mol_type = other RNA
gcccgttgggcagttgtgtgac

SEQ ID NO: 2666 - RNA, 22 nt, synthetic construct
  source 1..22: mol_type = other RNA
gccctgaccacgctcatgtgga

SEQ ID NO: 2667 - RNA, 22 nt, synthetic construct
  source 1..22: mol_type = other RNA
gccctgctcgtggtgaccgaag

SEQ ID NO: 2668 - RNA, 22 nt, synthetic construct
  source 1..22: mol_type = other RNA
gccgcacctgtcaccctgagct

SEQ ID NO: 2669 - RNA, 22 nt, synthetic construct
  source 1..22: mol_type = other RNA
gccgccttccccgaggaccgca

SEQ ID NO: 2670 - RNA, 22 nt, synthetic construct
  source 1..22: mol_type = other RNA
gccgctgtcattgcgccgggcc

SEQ ID NO: 2671 - RNA, 22 nt, synthetic construct
  source 1..22: mol_type = other RNA
gccgcttccgtgtcacacaact

SEQ ID NO: 2672 - RNA, 22 nt, synthetic construct
  source 1..22: mol_type = other RNA
gccgggccctgaccacgctcat

SEQ ID NO: 2673 - RNA, 22 nt, synthetic construct
  source 1..22: mol_type = other RNA
gcctccgaggccgcacctgtca

SEQ ID NO: 2674 - RNA, 22 nt, synthetic construct
  source 1..22: mol_type = other RNA
gcctgcgggcagagctcagggt

SEQ ID NO: 2675 - RNA, 22 nt, synthetic construct
  source 1..22: mol_type = other RNA
gcctgtctggggagtctgagag

SEQ ID NO: 2676 - RNA, 22 nt, synthetic construct
  source 1..22: mol_type = other RNA
gccttccccgaggaccgcagcc

SEQ ID NO: 2677 - RNA, 22 nt, synthetic construct
  source 1..22: mol_type = other RNA
gccttgggggccagggagatgg

SEQ ID NO: 2678 - RNA, 22 nt, synthetic construct
  source 1..22: mol_type = other RNA
gcgcaatgacagcggcacctac

SEQ ID NO: 2679 - RNA, 22 nt, synthetic construct
  source 1..22: mol_type = other RNA
gcgcagatcaaagagagcctgc

SEQ ID NO: 2680 - RNA, 22 nt, synthetic construct
  source 1..22: mol_type = other RNA
gcgccttgggggccagggagat

SEQ ID NO: 2681 - RNA, 22 nt, synthetic construct
  source 1..22: mol_type = other RNA
gcggcacctacctctgtggggc

SEQ ID NO: 2682 - RNA, 22 nt, synthetic construct
  source 1..22: mol_type = other RNA
gcggccagcttgtccgtctggt

SEQ ID NO: 2683 - RNA, 22 nt, synthetic construct
  source 1..22: mol_type = other RNA
gcgggcagagctcagggtgaca

SEQ ID NO: 2684 - RNA, 22 nt, synthetic construct
  source 1..22: mol_type = other RNA
gcggtaccagtttagcacgaag

SEQ ID NO: 2685 - RNA, 22 nt, synthetic construct
  source 1..22: mol_type = other RNA
gcgtgacttccacatgagcgtg

SEQ ID NO: 2686 - RNA, 22 nt, synthetic construct
  source 1..22: mol_type = other RNA
gcgtggtcagggcccggcgcaa

SEQ ID NO: 2687 - RNA, 22 nt, synthetic construct
  source 1..22: mol_type = other RNA
gcgttgtccccttcggtcacca

SEQ ID NO: 2688 - RNA, 22 nt, synthetic construct
  source 1..22: mol_type = other RNA
gctaaactggtaccgcatgagc

SEQ ID NO: 2689 - RNA, 22 nt, synthetic construct
  source 1..22: mol_type = other RNA
gctcagctcacccctgccccgg

SEQ ID NO: 2690 - RNA, 22 nt, synthetic construct
  source 1..22: mol_type = other RNA
gctcagggtgacaggtgcggcc

SEQ ID NO: 2691 - RNA, 22 nt, synthetic construct
  source 1..22: mol_type = other RNA
gctcatgcggtaccagtttagc

SEQ ID NO: 2692 - RNA, 22 nt, synthetic construct
  source 1..22: mol_type = other RNA
gctcatgtggaagtcacgcccg

SEQ ID NO: 2693 - RNA, 22 nt, synthetic construct
  source 1..22: mol_type = other RNA
gctcgtggtgaccgaaggggac

SEQ ID NO: 2694 - RNA, 22 nt, synthetic construct
  source 1..22: mol_type = other RNA
gctctccgatgtgttggagaag

SEQ ID NO: 2695 - RNA, 22 nt, synthetic construct
  source 1..22: mol_type = other RNA
gctctctttgatctgcgccttg

SEQ ID NO: 2696 - RNA, 22 nt, synthetic construct
  source 1..22: mol_type = other RNA
gctctgcccgcaggctctcttt

SEQ ID NO: 2697 - RNA, 22 nt, synthetic construct
  source 1..22: mol_type = other RNA
gctgcaggtgaaggtggcgttg

SEQ ID NO: 2698 - RNA, 22 nt, synthetic construct
  source 1..22: mol_type = other RNA
gctgcggtcctcggggaaggcg

SEQ ID NO: 2699 - RNA, 22 nt, synthetic construct
  source 1..22: mol_type = other RNA
gctggccgccttccccgaggac

SEQ ID NO: 2700 - RNA, 22 nt, synthetic construct
  source 1..22: mol_type = other RNA
gctggctgcggtcctcggggaa

SEQ ID NO: 2701 - RNA, 22 nt, synthetic construct
  source 1..22: mol_type = other RNA
gctggggctcatgcggtaccag

SEQ ID NO: 2702 - RNA, 22 nt, synthetic construct
  source 1..22: mol_type = other RNA
gctgtcattgcgccgggccctg

SEQ ID NO: 2703 - RNA, 22 nt, synthetic construct
  source 1..22: mol_type = other RNA
gcttccgtgtcacacaactgcc

SEQ ID NO: 2704 - RNA, 22 nt, synthetic construct
  source 1..22: mol_type = other RNA
gcttcgtgctaaactggtaccg

SEQ ID NO: 2705 - RNA, 22 nt, synthetic construct
  source 1..22: mol_type = other RNA
gcttctccaacacatcggagag

SEQ ID NO: 2706 - RNA, 22 nt, synthetic construct
  source 1..22: mol_type = other RNA
gcttgtccgtctggttgctggg

SEQ ID NO: 2707 - RNA, 22 nt, synthetic construct
  source 1..22: mol_type = other RNA
ggaagcggcagtcctggccggg

SEQ ID NO: 2708 - RNA, 22 nt, synthetic construct
  source 1..22: mol_type = other RNA
ggaaggcggccagcttgtccgt

SEQ ID NO: 2709 - RNA, 22 nt, synthetic construct
  source 1..22: mol_type = other RNA
ggaagtcacgcccgttgggcag

SEQ ID NO: 2710 - RNA, 22 nt, synthetic construct
  source 1..22: mol_type = other RNA
ggacaacgccaccttcacctgc

SEQ ID NO: 2711 - RNA, 22 nt, synthetic construct
  source 1..22: mol_type = other RNA
ggacaagctggccgccttcccc

SEQ ID NO: 2712 - RNA, 22 nt, synthetic construct
  source 1..22: mol_type = other RNA
ggactgccgcttccgtgtcaca

SEQ ID NO: 2713 - RNA, 22 nt, synthetic construct
  source 1..22: mol_type = other RNA
ggagaagctgcaggtgaaggtg

SEQ ID NO: 2714 - RNA, 22 nt, synthetic construct
  source 1..22: mol_type = other RNA
ggagagcttcgtgctaaactgg

SEQ ID NO: 2715 - RNA, 22 nt, synthetic construct
  source 1..22: mol_type = other RNA
ggagatggccccacagaggtag

SEQ ID NO: 2716 - RNA, 22 nt, synthetic construct
  source 1..22: mol_type = other RNA
ggagtctgagagatggagagag

SEQ ID NO: 2717 - RNA, 22 nt, synthetic construct
  source 1..22: mol_type = other RNA
ggcacctacctctgtggggcca

SEQ ID NO: 2718 - RNA, 22 nt, synthetic construct
  source 1..22: mol_type = other RNA
ggcagagctcagggtgacaggt

SEQ ID NO: 2719 - RNA, 22 nt, synthetic construct
  source 1..22: mol_type = other RNA
ggcagtcctggccgggctggct

SEQ ID NO: 2720 - RNA, 22 nt, synthetic construct
  source 1..22: mol_type = other RNA
ggcagttgtgtgacacggaagc

SEQ ID NO: 2721 - RNA, 22 nt, synthetic construct
  source 1..22: mol_type = other RNA
ggccagcttgtccgtctggttg

SEQ ID NO: 2722 - RNA, 22 nt, synthetic construct
  source 1..22: mol_type = other RNA
ggccaggactgccgcttccgtg

SEQ ID NO: 2723 - RNA, 22 nt, synthetic construct
  source 1..22: mol_type = other RNA
ggccagggagatggccccacag

SEQ ID NO: 2724 - RNA, 22 nt, synthetic construct
  source 1..22: mol_type = other RNA
ggccatctccctggcccccaag

SEQ ID NO: 2725 - RNA, 22 nt, synthetic construct
  source 1..22: mol_type = other RNA
ggccccacagaggtaggtgccg

SEQ ID NO: 2726 - RNA, 22 nt, synthetic construct
  source 1..22: mol_type = other RNA
ggcccccaaggcgcagatcaaa

SEQ ID NO: 2727 - RNA, 22 nt, synthetic construct
  source 1..22: mol_type = other RNA
ggcccggcgcaatgacagcggc

SEQ ID NO: 2728 - RNA, 22 nt, synthetic construct
  source 1..22: mol_type = other RNA
ggccctgaccacgctcatgtgg

SEQ ID NO: 2729 - RNA, 22 nt, synthetic construct
  source 1..22: mol_type = other RNA
ggccgcacctgtcaccctgagc

SEQ ID NO: 2730 - RNA, 22 nt, synthetic construct
  source 1..22: mol_type = other RNA
ggcctccgaggccgcacctgtc

SEQ ID NO: 2731 - RNA, 22 nt, synthetic construct
  source 1..22: mol_type = other RNA
ggcctgtctggggagtctgaga

SEQ ID NO: 2732 - RNA, 22 nt, synthetic construct
  source 1..22: mol_type = other RNA
ggcgcaatgacagcggcaccta

SEQ ID NO: 2733 - RNA, 22 nt, synthetic construct
  source 1..22: mol_type = other RNA
ggcgcagatcaaagagagcctg

SEQ ID NO: 2734 - RNA, 22 nt, synthetic construct
  source 1..22: mol_type = other RNA
ggcggccagcttgtccgtctgg

SEQ ID NO: 2735 - RNA, 22 nt, synthetic construct
  source 1..22: mol_type = other RNA
ggcgtgacttccacatgagcgt

SEQ ID NO: 2736 - RNA, 22 nt, synthetic construct
  source 1..22: mol_type = other RNA
ggcgttgtccccttcggtcacc

SEQ ID NO: 2737 - RNA, 22 nt, synthetic construct
  source 1..22: mol_type = other RNA
ggctcatgcggtaccagtttag

SEQ ID NO: 2738 - RNA, 22 nt, synthetic construct
  source 1..22: mol_type = other RNA
ggctctctttgatctgcgcctt

SEQ ID NO: 2739 - RNA, 22 nt, synthetic construct
  source 1..22: mol_type = other RNA
ggctgcggtcctcggggaaggc

SEQ ID NO: 2740 - RNA, 22 nt, synthetic construct
  source 1..22: mol_type = other RNA
ggctggctgcggtcctcgggga

SEQ ID NO: 2741 - RNA, 22 nt, synthetic construct
  source 1..22: mol_type = other RNA
gggaaggcggccagcttgtccg

SEQ ID NO: 2742 - RNA, 22 nt, synthetic construct
  source 1..22: mol_type = other RNA
gggacaacgccaccttcacctg

SEQ ID NO: 2743 - RNA, 22 nt, synthetic construct
  source 1..22: mol_type = other RNA
gggagatggccccacagaggta

SEQ ID NO: 2744 - RNA, 22 nt, synthetic construct
  source 1..22: mol_type = other RNA
gggagtctgagagatggagaga

SEQ ID NO: 2745 - RNA, 22 nt, synthetic construct
  source 1..22: mol_type = other RNA
gggcagagctcagggtgacagg

SEQ ID NO: 2746 - RNA, 22 nt, synthetic construct
  source 1..22: mol_type = other RNA
gggcagttgtgtgacacggaag

SEQ ID NO: 2747 - RNA, 22 nt, synthetic construct
  source 1..22: mol_type = other RNA
gggccagggagatggccccaca

SEQ ID NO: 2748 - RNA, 22 nt, synthetic construct
  source 1..22: mol_type = other RNA
gggccatctccctggcccccaa

SEQ ID NO: 2749 - RNA, 22 nt, synthetic construct
  source 1..22: mol_type = other RNA
gggcccggcgcaatgacagcgg

SEQ ID NO: 2750 - RNA, 22 nt, synthetic construct
  source 1..22: mol_type = other RNA
gggccctgaccacgctcatgtg

SEQ ID NO: 2751 - RNA, 22 nt, synthetic construct
  source 1..22: mol_type = other RNA
gggcctccgaggccgcacctgt

SEQ ID NO: 2752 - RNA, 22 nt, synthetic construct
  source 1..22: mol_type = other RNA
gggcctgtctggggagtctgag

SEQ ID NO: 2753 - RNA, 22 nt, synthetic construct
  source 1..22: mol_type = other RNA
gggcgtgacttccacatgagcg

SEQ ID NO: 2754 - RNA, 22 nt, synthetic construct
  source 1..22: mol_type = other RNA
gggctcatgcggtaccagttta

SEQ ID NO: 2755 - RNA, 22 nt, synthetic construct
  source 1..22: mol_type = other RNA
gggctggggagaaggtgggggg

SEQ ID NO: 2756 - RNA, 22 nt, synthetic construct
  source 1..22: mol_type = other RNA
ggggaaggcggccagcttgtcc

SEQ ID NO: 2757 - RNA, 22 nt, synthetic construct
  source 1..22: mol_type = other RNA
ggggacaacgccaccttcacct

SEQ ID NO: 2758 - RNA, 22 nt, synthetic construct
  source 1..22: mol_type = other RNA
ggggagtctgagagatggagag

SEQ ID NO: 2759 - RNA, 22 nt, synthetic construct
  source 1..22: mol_type = other RNA
ggggccagggagatggccccac

SEQ ID NO: 2760 - RNA, 22 nt, synthetic construct
  source 1..22: mol_type = other RNA
ggggccatctccctggccccca

SEQ ID NO: 2761 - RNA, 22 nt, synthetic construct
  source 1..22: mol_type = other RNA
ggggctcatgcggtaccagttt

SEQ ID NO: 2762 - RNA, 22 nt, synthetic construct
  source 1..22: mol_type = other RNA
gggggccagggagatggcccca

SEQ ID NO: 2763 - RNA, 22 nt, synthetic construct
  source 1..22: mol_type = other RNA
ggggggttccagggcctgtctg

SEQ ID NO: 2764 - RNA, 22 nt, synthetic construct
  source 1..22: mol_type = other RNA
gggggttccagggcctgtctgg

SEQ ID NO: 2765 - RNA, 22 nt, synthetic construct
  source 1..22: mol_type = other RNA
ggggttccagggcctgtctggg

SEQ ID NO: 2766 - RNA, 22 nt, synthetic construct
  source 1..22: mol_type = other RNA
gggtgacaggtgcggcctcgga

SEQ ID NO: 2767 - RNA, 22 nt, synthetic construct
  source 1..22: mol_type = other RNA
gggttccagggcctgtctgggg

SEQ ID NO: 2768 - RNA, 22 nt, synthetic construct
  source 1..22: mol_type = other RNA
ggtaccagtttagcacgaagct

SEQ ID NO: 2769 - RNA, 22 nt, synthetic construct
  source 1..22: mol_type = other RNA
ggtaccgcatgagccccagcaa

SEQ ID NO: 2770 - RNA, 22 nt, synthetic construct
  source 1..22: mol_type = other RNA
ggtaggtgccgctgtcattgcg

SEQ ID NO: 2771 - RNA, 22 nt, synthetic construct
  source 1..22: mol_type = other RNA
ggtcaccacgagcagggctggg

SEQ ID NO: 2772 - RNA, 22 nt, synthetic construct
  source 1..22: mol_type = other RNA
ggtcagggcccggcgcaatgac

SEQ ID NO: 2773 - RNA, 22 nt, synthetic construct
  source 1..22: mol_type = other RNA
ggtcctcggggaaggcggccag

SEQ ID NO: 2774 - RNA, 22 nt, synthetic construct
  source 1..22: mol_type = other RNA
ggtgaaggtggcgttgtcccct

SEQ ID NO: 2775 - RNA, 22 nt, synthetic construct
  source 1..22: mol_type = other RNA
ggtgacaggtgcggcctcggag

SEQ ID NO: 2776 - RNA, 22 nt, synthetic construct
  source 1..22: mol_type = other RNA
ggtgaccgaaggggacaacgcc

SEQ ID NO: 2777 - RNA, 22 nt, synthetic construct
  source 1..22: mol_type = other RNA
ggtgccgctgtcattgcgccgg

SEQ ID NO: 2778 - RNA, 22 nt, synthetic construct
  source 1..22: mol_type = other RNA
ggtggcgttgtccccttcggtc

SEQ ID NO: 2779 - RNA, 22 nt, synthetic construct
  source 1..22: mol_type = other RNA
ggttccagggcctgtctgggga

SEQ ID NO: 2780 - RNA, 22 nt, synthetic construct
  source 1..22: mol_type = other RNA
ggttgctggggctcatgcggta

SEQ ID NO: 2781 - RNA, 22 nt, synthetic construct
  source 1..22: mol_type = other RNA
gtaccagtttagcacgaagctc

SEQ ID NO: 2782 - RNA, 22 nt, synthetic construct
  source 1..22: mol_type = other RNA
gtaccgcatgagccccagcaac

SEQ ID NO: 2783 - RNA, 22 nt, synthetic construct
  source 1..22: mol_type = other RNA
gtaggtgccgctgtcattgcgc

SEQ ID NO: 2784 - RNA, 22 nt, synthetic construct
  source 1..22: mol_type = other RNA
gtcacacaactgcccaacgggc

SEQ ID NO: 2785 - RNA, 22 nt, synthetic construct
  source 1..22: mol_type = other RNA
gtcaccacgagcagggctgggg

SEQ ID NO: 2786 - RNA, 22 nt, synthetic construct
  source 1..22: mol_type = other RNA
gtcaccctgagctctgcccgca

SEQ ID NO: 2787 - RNA, 22 nt, synthetic construct
  source 1..22: mol_type = other RNA
gtcacgcccgttgggcagttgt

SEQ ID NO: 2788 - RNA, 22 nt, synthetic construct
  source 1..22: mol_type = other RNA
gtcagggcccggcgcaatgaca

SEQ ID NO: 2789 - RNA, 22 nt, synthetic construct
  source 1..22: mol_type = other RNA
gtcattgcgccgggccctgacc

SEQ ID NO: 2790 - RNA, 22 nt, synthetic construct
  source 1..22: mol_type = other RNA
gtccccttcggtcaccacgagc

SEQ ID NO: 2791 - RNA, 22 nt, synthetic construct
  source 1..22: mol_type = other RNA
gtccgtctggttgctggggctc

SEQ ID NO: 2792 - RNA, 22 nt, synthetic construct
  source 1..22: mol_type = other RNA
gtcctcggggaaggcggccagc

SEQ ID NO: 2793 - RNA, 22 nt, synthetic construct
  source 1..22: mol_type = other RNA
gtctgagagatggagagaggtg

SEQ ID NO: 2794 - RNA, 22 nt, synthetic construct
  source 1..22: mol_type = other RNA
gtctggggagtctgagagatgg

SEQ ID NO: 2795 - RNA, 22 nt, synthetic construct
  source 1..22: mol_type = other RNA
gtctggttgctggggctcatgc

SEQ ID NO: 2796 - RNA, 22 nt, synthetic construct
  source 1..22: mol_type = other RNA
gtgaaggtggcgttgtcccctt

SEQ ID NO: 2797 - RNA, 22 nt, synthetic construct
  source 1..22: mol_type = other RNA
gtgacacggaagcggcagtcct

SEQ ID NO: 2798 - RNA, 22 nt, synthetic construct
  source 1..22: mol_type = other RNA
gtgacaggtgcggcctcggagg

SEQ ID NO: 2799 - RNA, 22 nt, synthetic construct
  source 1..22: mol_type = other RNA
gtgaccgaaggggacaacgcca

SEQ ID NO: 2800 - RNA, 22 nt, synthetic construct
  source 1..22: mol_type = other RNA
gtgacttccacatgagcgtggt

SEQ ID NO: 2801 - RNA, 22 nt, synthetic construct
  source 1..22: mol_type = other RNA
gtgccgctgtcattgcgccggg

SEQ ID NO: 2802 - RNA, 22 nt, synthetic construct
  source 1..22: mol_type = other RNA
gtgctaaactggtaccgcatga

SEQ ID NO: 2803 - RNA, 22 nt, synthetic construct
  source 1..22: mol_type = other RNA
gtggaagtcacgcccgttgggc

SEQ ID NO: 2804 - RNA, 22 nt, synthetic construct
  source 1..22: mol_type = other RNA
gtggcgttgtccccttcggtca

SEQ ID NO: 2805 - RNA, 22 nt, synthetic construct
  source 1..22: mol_type = other RNA
gtggggccatctccctggcccc

SEQ ID NO: 2806 - RNA, 22 nt, synthetic construct
  source 1..22: mol_type = other RNA
gtggtcagggcccggcgcaatg

SEQ ID NO: 2807 - RNA, 22 nt, synthetic construct
  source 1..22: mol_type = other RNA
gtggtgaccgaaggggacaacg

SEQ ID NO: 2808 - RNA, 22 nt, synthetic construct
  source 1..22: mol_type = other RNA
gtgtcacacaactgcccaacgg

SEQ ID NO: 2809 - RNA, 22 nt, synthetic construct
  source 1..22: mol_type = other RNA
gtgtgacacggaagcggcagtc

SEQ ID NO: 2810 - RNA, 22 nt, synthetic construct
  source 1..22: mol_type = other RNA
gtgttggagaagctgcaggtga

SEQ ID NO: 2811 - RNA, 22 nt, synthetic construct
  source 1..22: mol_type = other RNA
gttccagggcctgtctggggag

SEQ ID NO: 2812 - RNA, 22 nt, synthetic construct
  source 1..22: mol_type = other RNA
gttgctggggctcatgcggtac

SEQ ID NO: 2813 - RNA, 22 nt, synthetic construct
  source 1..22: mol_type = other RNA
gttggagaagctgcaggtgaag

SEQ ID NO: 2814 - RNA, 22 nt, synthetic construct
  source 1..22: mol_type = other RNA
gttgggcagttgtgtgacacgg

SEQ ID NO: 2815 - RNA, 22 nt, synthetic construct
  source 1..22: mol_type = other RNA
gttgtccccttcggtcaccacg

SEQ ID NO: 2816 - RNA, 22 nt, synthetic construct
  source 1..22: mol_type = other RNA
gttgtgtgacacggaagcggca

SEQ ID NO: 2817 - RNA, 22 nt, synthetic construct
  source 1..22: mol_type = other RNA
gtttagcacgaagctctccgat

SEQ ID NO: 2818 - RNA, 22 nt, synthetic construct
  source 1..22: mol_type = other RNA
taaactggtaccgcatgagccc

SEQ ID NO: 2819 - RNA, 22 nt, synthetic construct
  source 1..22: mol_type = other RNA
taccagtttagcacgaagctct

SEQ ID NO: 2820 - RNA, 22 nt, synthetic construct
  source 1..22: mol_type = other RNA
taccgcatgagccccagcaacc

SEQ ID NO: 2821 - RNA, 22 nt, synthetic construct
  source 1..22: mol_type = other RNA
tacctctgtggggccatctccc

SEQ ID NO: 2822 - RNA, 22 nt, synthetic construct
  source 1..22: mol_type = other RNA
tagcacgaagctctccgatgtg

SEQ ID NO: 2823 - RNA, 22 nt, synthetic construct
  source 1..22: mol_type = other RNA
taggtgccgctgtcattgcgcc

SEQ ID NO: 2824 - RNA, 22 nt, synthetic construct
  source 1..22: mol_type = other RNA
tcaaagagagcctgcgggcaga

SEQ ID NO: 2825 - RNA, 22 nt, synthetic construct
  source 1..22: mol_type = other RNA
tcacacaactgcccaacgggcg

SEQ ID NO: 2826 - RNA, 22 nt, synthetic construct
  source 1..22: mol_type = other RNA
tcaccacgagcagggctgggga

SEQ ID NO: 2827 - RNA, 22 nt, synthetic construct
  source 1..22: mol_type = other RNA
tcaccctgagctctgcccgcag

SEQ ID NO: 2828 - RNA, 22 nt, synthetic construct
  source 1..22: mol_type = other RNA
tcacctctctccatctctcaga

SEQ ID NO: 2829 - RNA, 22 nt, synthetic construct
  source 1..22: mol_type = other RNA
tcacctgcagcttctccaacac

SEQ ID NO: 2830 - RNA, 22 nt, synthetic construct
  source 1..22: mol_type = other RNA
tcacgcccgttgggcagttgtg

SEQ ID NO: 2831 - RNA, 22 nt, synthetic construct
  source 1..22: mol_type = other RNA
tcagactccccagacaggccct

SEQ ID NO: 2832 - RNA, 22 nt, synthetic construct
  source 1..22: mol_type = other RNA
tcagctcacccctgccccgggg

SEQ ID NO: 2833 - RNA, 22 nt, synthetic construct
  source 1..22: mol_type = other RNA
tcagggcccggcgcaatgacag

SEQ ID NO: 2834 - RNA, 22 nt, synthetic construct
  source 1..22: mol_type = other RNA
tcagggtgacaggtgcggcctc

SEQ ID NO: 2835 - RNA, 22 nt, synthetic construct
  source 1..22: mol_type = other RNA
tcatgcggtaccagtttagcac

SEQ ID NO: 2836 - RNA, 22 nt, synthetic construct
  source 1..22: mol_type = other RNA
tcatgtggaagtcacgcccgtt

SEQ ID NO: 2837 - RNA, 22 nt, synthetic construct
  source 1..22: mol_type = other RNA
tcattgcgccgggccctgacca

SEQ ID NO: 2838 - RNA, 22 nt, synthetic construct
  source 1..22: mol_type = other RNA
tccaacacatcggagagcttcg

SEQ ID NO: 2839 - RNA, 22 nt, synthetic construct
  source 1..22: mol_type = other RNA
tccacatgagcgtggtcagggc

SEQ ID NO: 2840 - RNA, 22 nt, synthetic construct
  source 1..22: mol_type = other RNA
tccagggcctgtctggggagtc

SEQ ID NO: 2841 - RNA, 22 nt, synthetic construct
  source 1..22: mol_type = other RNA
tccatctctcagactccccaga

SEQ ID NO: 2842 - RNA, 22 nt, synthetic construct
  source 1..22: mol_type = other RNA
tccccagacaggccctggaacc

SEQ ID NO: 2843 - RNA, 22 nt, synthetic construct
  source 1..22: mol_type = other RNA
tccccagccctgctcgtggtga

SEQ ID NO: 2844 - RNA, 22 nt, synthetic construct
  source 1..22: mol_type = other RNA
tccccgaggaccgcagccagcc

SEQ ID NO: 2845 - RNA, 22 nt, synthetic construct
  source 1..22: mol_type = other RNA
tccccttcggtcaccacgagca

SEQ ID NO: 2846 - RNA, 22 nt, synthetic construct
  source 1..22: mol_type = other RNA
tccctggcccccaaggcgcaga

SEQ ID NO: 2847 - RNA, 22 nt, synthetic construct
  source 1..22: mol_type = other RNA
tccgaggccgcacctgtcaccc

SEQ ID NO: 2848 - RNA, 22 nt, synthetic construct
  source 1..22: mol_type = other RNA
tccgatgtgttggagaagctgc

SEQ ID NO: 2849 - RNA, 22 nt, synthetic construct
  source 1..22: mol_type = other RNA
tccgtctggttgctggggctca

SEQ ID NO: 2850 - RNA, 22 nt, synthetic construct
  source 1..22: mol_type = other RNA
tccgtgtcacacaactgcccaa

SEQ ID NO: 2851 - RNA, 22 nt, synthetic construct
  source 1..22: mol_type = other RNA
tcctcacctctctccatctctc

SEQ ID NO: 2852 - RNA, 22 nt, synthetic construct
  source 1..22: mol_type = other RNA
tcctcggggaaggcggccagct

SEQ ID NO: 2853 - RNA, 22 nt, synthetic construct
  source 1..22: mol_type = other RNA
tcctggccgggctggctgcggt

SEQ ID NO: 2854 - RNA, 22 nt, synthetic construct
  source 1..22: mol_type = other RNA
tcggagagcttcgtgctaaact

SEQ ID NO: 2855 - RNA, 22 nt, synthetic construct
  source 1..22: mol_type = other RNA
tcggggaaggcggccagcttgt

SEQ ID NO: 2856 - RNA, 22 nt, synthetic construct
  source 1..22: mol_type = other RNA
tcggtcaccacgagcagggctg

SEQ ID NO: 2857 - RNA, 22 nt, synthetic construct
  source 1..22: mol_type = other RNA
tcgtgctaaactggtaccgcat

SEQ ID NO: 2858 - RNA, 22 nt, synthetic construct
  source 1..22: mol_type = other RNA
tcgtggtgaccgaaggggacaa

SEQ ID NO: 2859 - RNA, 22 nt, synthetic construct
  source 1..22: mol_type = other RNA
tctcagactccccagacaggcc

SEQ ID NO: 2860 - RNA, 22 nt, synthetic construct
  source 1..22: mol_type = other RNA
tctccaacacatcggagagctt

SEQ ID NO: 2861 - RNA, 22 nt, synthetic construct
  source 1..22: mol_type = other RNA
tctccatctctcagactcccca

SEQ ID NO: 2862 - RNA, 22 nt, synthetic construct
  source 1..22: mol_type = other RNA
tctccccagccctgctcgtggt

SEQ ID NO: 2863 - RNA, 22 nt, synthetic construct
  source 1..22: mol_type = other RNA
tctccctggcccccaaggcgca

SEQ ID NO: 2864 - RNA, 22 nt, synthetic construct
  source 1..22: mol_type = other RNA
tctccgatgtgttggagaagct

SEQ ID NO: 2865 - RNA, 22 nt, synthetic construct
  source 1..22: mol_type = other RNA
tctctcagactccccagacagg

SEQ ID NO: 2866 - RNA, 22 nt, synthetic construct
  source 1..22: mol_type = other RNA
tctctccatctctcagactccc

SEQ ID NO: 2867 - RNA, 22 nt, synthetic construct
  source 1..22: mol_type = other RNA
tctctttgatctgcgccttggg

SEQ ID NO: 2868 - RNA, 22 nt, synthetic construct
  source 1..22: mol_type = other RNA
tctgagagatggagagaggtga

SEQ ID NO: 2869 - RNA, 22 nt, synthetic construct
  source 1..22: mol_type = other RNA
tctgcccgcaggctctctttga

SEQ ID NO: 2870 - RNA, 22 nt, synthetic construct
  source 1..22: mol_type = other RNA
tctgcgccttgggggccaggga

SEQ ID NO: 2871 - RNA, 22 nt, synthetic construct
  source 1..22: mol_type = other RNA
tctggggagtctgagagatgga

SEQ ID NO: 2872 - RNA, 22 nt, synthetic construct
  source 1..22: mol_type = other RNA
tctggttgctggggctcatgcg

SEQ ID NO: 2873 - RNA, 22 nt, synthetic construct
  source 1..22: mol_type = other RNA
tctgtggggccatctccctggc

SEQ ID NO: 2874 - RNA, 22 nt, synthetic construct
  source 1..22: mol_type = other RNA
tctttgatctgcgccttggggg

SEQ ID NO: 2875 - RNA, 22 nt, synthetic construct
  source 1..22: mol_type = other RNA
tgaaggtggcgttgtccccttc

SEQ ID NO: 2876 - RNA, 22 nt, synthetic construct
  source 1..22: mol_type = other RNA
tgacacggaagcggcagtcctg

SEQ ID NO: 2877 - RNA, 22 nt, synthetic construct
  source 1..22: mol_type = other RNA
tgacagcggcacctacctctgt

SEQ ID NO: 2878 - RNA, 22 nt, synthetic construct
  source 1..22: mol_type = other RNA
tgacaggtgcggcctcggaggc

SEQ ID NO: 2879 - RNA, 22 nt, synthetic construct
  source 1..22: mol_type = other RNA
tgaccacgctcatgtggaagtc

SEQ ID NO: 2880 - RNA, 22 nt, synthetic construct
  source 1..22: mol_type = other RNA
tgaccgaaggggacaacgccac

SEQ ID NO: 2881 - RNA, 22 nt, synthetic construct
  source 1..22: mol_type = other RNA
tgacttccacatgagcgtggtc

SEQ ID NO: 2882 - RNA, 22 nt, synthetic construct
  source 1..22: mol_type = other RNA
tgagagatggagagaggtgagg

SEQ ID NO: 2883 - RNA, 22 nt, synthetic construct
  source 1..22: mol_type = other RNA
tgagccccagcaaccagacgga

SEQ ID NO: 2884 - RNA, 22 nt, synthetic construct
  source 1..22: mol_type = other RNA
tgagcgtggtcagggcccggcg

SEQ ID NO: 2885 - RNA, 22 nt, synthetic construct
  source 1..22: mol_type = other RNA
tgagctctgcccgcaggctctc

SEQ ID NO: 2886 - RNA, 22 nt, synthetic construct
  source 1..22: mol_type = other RNA
tgatctgcgccttgggggccag

SEQ ID NO: 2887 - RNA, 22 nt, synthetic construct
  source 1..22: mol_type = other RNA
tgcagcttctccaacacatcgg

SEQ ID NO: 2888 - RNA, 22 nt, synthetic construct
  source 1..22: mol_type = other RNA
tgcaggtgaaggtggcgttgtc

SEQ ID NO: 2889 - RNA, 22 nt, synthetic construct
  source 1..22: mol_type = other RNA
tgcccaacgggcgtgacttcca

SEQ ID NO: 2890 - RNA, 22 nt, synthetic construct
  source 1..22: mol_type = other RNA
tgcccgcaggctctctttgatc

SEQ ID NO: 2891 - RNA, 22 nt, synthetic construct
  source 1..22: mol_type = other RNA
tgccgctgtcattgcgccgggc

SEQ ID NO: 2892 - RNA, 22 nt, synthetic construct
  source 1..22: mol_type = other RNA
tgccgcttccgtgtcacacaac

SEQ ID NO: 2893 - RNA, 22 nt, synthetic construct
  source 1..22: mol_type = other RNA
tgcgccgggccctgaccacgct

SEQ ID NO: 2894 - RNA, 22 nt, synthetic construct
  source 1..22: mol_type = other RNA
tgcgccttgggggccagggaga

SEQ ID NO: 2895 - RNA, 22 nt, synthetic construct
  source 1..22: mol_type = other RNA
tgcgggcagagctcagggtgac

SEQ ID NO: 2896 - RNA, 22 nt, synthetic construct
  source 1..22: mol_type = other RNA
tgcggtaccagtttagcacgaa

SEQ ID NO: 2897 - RNA, 22 nt, synthetic construct
  source 1..22: mol_type = other RNA
tgcggtcctcggggaaggcggc

SEQ ID NO: 2898 - RNA, 22 nt, synthetic construct
  source 1..22: mol_type = other RNA
tgctaaactggtaccgcatgag

SEQ ID NO: 2899 - RNA, 22 nt, synthetic construct
  source 1..22: mol_type = other RNA
tgctcgtggtgaccgaagggga

SEQ ID NO: 2900 - RNA, 22 nt, synthetic construct
  source 1..22: mol_type = other RNA
tgctggggctcatgcggtacca

SEQ ID NO: 2901 - RNA, 22 nt, synthetic construct
  source 1..22: mol_type = other RNA
tggaagtcacgcccgttgggca

SEQ ID NO: 2902 - RNA, 22 nt, synthetic construct
  source 1..22: mol_type = other RNA
tggagaagctgcaggtgaaggt

SEQ ID NO: 2903 - RNA, 22 nt, synthetic construct
  source 1..22: mol_type = other RNA
tggagagaggtgaggaaggggc

SEQ ID NO: 2904 - RNA, 22 nt, synthetic construct
  source 1..22: mol_type = other RNA
tggccccacagaggtaggtgcc

SEQ ID NO: 2905 - RNA, 22 nt, synthetic construct
  source 1..22: mol_type = other RNA
tggcccccaaggcgcagatcaa

SEQ ID NO: 2906 - RNA, 22 nt, synthetic construct
  source 1..22: mol_type = other RNA
tggccgccttccccgaggaccg

SEQ ID NO: 2907 - RNA, 22 nt, synthetic construct
  source 1..22: mol_type = other RNA
tggccgggctggctgcggtcct

SEQ ID NO: 2908 - RNA, 22 nt, synthetic construct
  source 1..22: mol_type = other RNA
tggcgttgtccccttcggtcac

SEQ ID NO: 2909 - RNA, 22 nt, synthetic construct
  source 1..22: mol_type = other RNA
tggctgcggtcctcggggaagg

SEQ ID NO: 2910 - RNA, 22 nt, synthetic construct
  source 1..22: mol_type = other RNA
tgggcagttgtgtgacacggaa

SEQ ID NO: 2911 - RNA, 22 nt, synthetic construct
  source 1..22: mol_type = other RNA
tggggagtctgagagatggaga

SEQ ID NO: 2912 - RNA, 22 nt, synthetic construct
  source 1..22: mol_type = other RNA
tggggccatctccctggccccc

SEQ ID NO: 2913 - RNA, 22 nt, synthetic construct
  source 1..22: mol_type = other RNA
tggggctcatgcggtaccagtt

SEQ ID NO: 2914 - RNA, 22 nt, synthetic construct
  source 1..22: mol_type = other RNA
tgggggccagggagatggcccc

SEQ ID NO: 2915 - RNA, 22 nt, synthetic construct
  source 1..22: mol_type = other RNA
tggtaccgcatgagccccagca

SEQ ID NO: 2916 - RNA, 22 nt, synthetic construct
  source 1..22: mol_type = other RNA
tggtcagggcccggcgcaatga

SEQ ID NO: 2917 - RNA, 22 nt, synthetic construct
  source 1..22: mol_type = other RNA
tggtgaccgaaggggacaacgc

SEQ ID NO: 2918 - RNA, 22 nt, synthetic construct
  source 1..22: mol_type = other RNA
tggttgctggggctcatgcggt

SEQ ID NO: 2919 - RNA, 22 nt, synthetic construct
  source 1..22: mol_type = other RNA
tgtcacacaactgcccaacggg

SEQ ID NO: 2920 - RNA, 22 nt, synthetic construct
  source 1..22: mol_type = other RNA
tgtcaccctgagctctgcccgc

SEQ ID NO: 2921 - RNA, 22 nt, synthetic construct
  source 1..22: mol_type = other RNA
tgtcattgcgccgggccctgac

SEQ ID NO: 2922 - RNA, 22 nt, synthetic construct
  source 1..22: mol_type = other RNA
tgtccccttcggtcaccacgag

SEQ ID NO: 2923 - RNA, 22 nt, synthetic construct
  source 1..22: mol_type = other RNA
tgtccgtctggttgctggggct

SEQ ID NO: 2924 - RNA, 22 nt, synthetic construct
  source 1..22: mol_type = other RNA
tgtctggggagtctgagagatg

SEQ ID NO: 2925 - RNA, 22 nt, synthetic construct
  source 1..22: mol_type = other RNA
tgtgacacggaagcggcagtcc

SEQ ID NO: 2926 - RNA, 22 nt, synthetic construct
  source 1..22: mol_type = other RNA
tgtggaagtcacgcccgttggg

SEQ ID NO: 2927 - RNA, 22 nt, synthetic construct
  source 1..22: mol_type = other RNA
tgtggggccatctccctggccc

SEQ ID NO: 2928 - RNA, 22 nt, synthetic construct
  source 1..22: mol_type = other RNA
tgtgtgacacggaagcggcagt

SEQ ID NO: 2929 - RNA, 22 nt, synthetic construct
  source 1..22: mol_type = other RNA
tgtgttggagaagctgcaggtg

SEQ ID NO: 2930 - RNA, 22 nt, synthetic construct
  source 1..22: mol_type = other RNA
tgttggagaagctgcaggtgaa

SEQ ID NO: 2931 - RNA, 22 nt, synthetic construct
  source 1..22: mol_type = other RNA
ttagcacgaagctctccgatgt

SEQ ID NO: 2932 - RNA, 22 nt, synthetic construct
  source 1..22: mol_type = other RNA
ttcacctgcagcttctccaaca

SEQ ID NO: 2933 - RNA, 22 nt, synthetic construct
  source 1..22: mol_type = other RNA
ttccacatgagcgtggtcaggg

SEQ ID NO: 2934 - RNA, 22 nt, synthetic construct
  source 1..22: mol_type = other RNA
ttccagggcctgtctggggagt

SEQ ID NO: 2935 - RNA, 22 nt, synthetic construct
  source 1..22: mol_type = other RNA
ttccccgaggaccgcagccagc

SEQ ID NO: 2936 - RNA, 22 nt, synthetic construct
  source 1..22: mol_type = other RNA
ttccgtgtcacacaactgccca

SEQ ID NO: 2937 - RNA, 22 nt, synthetic construct
  source 1..22: mol_type = other RNA
ttcctcacctctctccatctct

SEQ ID NO: 2938 - RNA, 22 nt, synthetic construct
  source 1..22: mol_type = other RNA
ttcggtcaccacgagcagggct

SEQ ID NO: 2939 - RNA, 22 nt, synthetic construct
  source 1..22: mol_type = other RNA
ttcgtgctaaactggtaccgca

SEQ ID NO: 2940 - RNA, 22 nt, synthetic construct
  source 1..22: mol_type = other RNA
ttctccaacacatcggagagct

SEQ ID NO: 2941 - RNA, 22 nt, synthetic construct
  source 1..22: mol_type = other RNA
ttctccccagccctgctcgtgg

SEQ ID NO: 2942 - RNA, 22 nt, synthetic construct
  source 1..22: mol_type = other RNA
ttgatctgcgccttgggggcca

SEQ ID NO: 2943 - RNA, 22 nt, synthetic construct
  source 1..22: mol_type = other RNA
ttgcgccgggccctgaccacgc

SEQ ID NO: 2944 - RNA, 22 nt, synthetic construct
  source 1..22: mol_type = other RNA
ttgctggggctcatgcggtacc

SEQ ID NO: 2945 - RNA, 22 nt, synthetic construct
  source 1..22: mol_type = other RNA
ttggagaagctgcaggtgaagg

SEQ ID NO: 2946 - RNA, 22 nt, synthetic construct
  source 1..22: mol_type = other RNA
ttgggcagttgtgtgacacgga

SEQ ID NO: 2947 - RNA, 22 nt, synthetic construct
  source 1..22: mol_type = other RNA
ttgggggccagggagatggccc

SEQ ID NO: 2948 - RNA, 22 nt, synthetic construct
  source 1..22: mol_type = other RNA
ttgtccccttcggtcaccacga

SEQ ID NO: 2949 - RNA, 22 nt, synthetic construct
  source 1..22: mol_type = other RNA
ttgtccgtctggttgctggggc

SEQ ID NO: 2950 - RNA, 22 nt, synthetic construct
  source 1..22: mol_type = other RNA
ttgtgtgacacggaagcggcag

SEQ ID NO: 2951 - RNA, 22 nt, synthetic construct
  source 1..22: mol_type = other RNA
tttagcacgaagctctccgatg

SEQ ID NO: 2952 - RNA, 22 nt, synthetic construct
  source 1..22: mol_type = other RNA
tttgatctgcgccttgggggcc

SEQ ID NO: 2953 - RNA, 20 nt, synthetic construct
  source 1..20: mol_type = other RNA
aaaccctggtggttggtgtc

SEQ ID NO: 2954 - RNA, 20 nt, synthetic construct
  source 1..20: mol_type = other RNA
aaccaccagggtttggaact

SEQ ID NO: 2955 - RNA, 20 nt, synthetic construct
  source 1..20: mol_type = other RNA
aacccctgacctttgtgccc

SEQ ID NO: 2956 - RNA, 20 nt, synthetic construct
  source 1..20: mol_type = other RNA
aaccctggtggttggtgtcg

SEQ ID NO: 2957 - RNA, 20 nt, synthetic construct
  source 1..20: mol_type = other RNA
aacgtcatcccagcccctcg

SEQ ID NO: 2958 - RNA, 20 nt, synthetic construct
  source 1..20: mol_type = other RNA
aactggccggctggcctggg

SEQ ID NO: 2959 - RNA, 20 nt, synthetic construct
  source 1..20: mol_type = other RNA
aagggcacaaaggtcagggg

SEQ ID NO: 2960 - RNA, 20 nt, synthetic construct
  source 1..20: mol_type = other RNA
aagggcagaagtgcccacag

SEQ ID NO: 2961 - RNA, 20 nt, synthetic construct
  source 1..20: mol_type = other RNA
aagtgcccacagcccacccc

SEQ ID NO: 2962 - RNA, 20 nt, synthetic construct
  source 1..20: mol_type = other RNA
acaaaggtcaggggttagga

SEQ ID NO: 2963 - RNA, 20 nt, synthetic construct
  source 1..20: mol_type = other RNA
acaccaaccaccagggtttg

SEQ ID NO: 2964 - RNA, 20 nt, synthetic construct
  source 1..20: mol_type = other RNA
acagcccaccccagcccctc

SEQ ID NO: 2965 - RNA, 20 nt, synthetic construct
  source 1..20: mol_type = other RNA
accaaccaccagggtttgga

SEQ ID NO: 2966 - RNA, 20 nt, synthetic construct
  source 1..20: mol_type = other RNA
accaccagggtttggaactg

SEQ ID NO: 2967 - RNA, 20 nt, synthetic construct
  source 1..20: mol_type = other RNA
accaggctgcccagcaggcc

SEQ ID NO: 2968 - RNA, 20 nt, synthetic construct
  source 1..20: mol_type = other RNA
accagggtttggaactggcc

SEQ ID NO: 2969 - RNA, 20 nt, synthetic construct
  source 1..20: mol_type = other RNA
acccagactagcagcaccag

SEQ ID NO: 2970 - RNA, 20 nt, synthetic construct
  source 1..20: mol_type = other RNA
acccaggccagccggccagt

SEQ ID NO: 2971 - RNA, 20 nt, synthetic construct
  source 1..20: mol_type = other RNA
accccagcccctcacccagg

SEQ ID NO: 2972 - RNA, 20 nt, synthetic construct
  source 1..20: mol_type = other RNA
accccgtcctaacccctgac

SEQ ID NO: 2973 - RNA, 20 nt, synthetic construct
  source 1..20: mol_type = other RNA
acccctgacctttgtgccct

SEQ ID NO: 2974 - RNA, 20 nt, synthetic construct
  source 1..20: mol_type = other RNA
accctggtggttggtgtcgt

SEQ ID NO: 2975 - RNA, 20 nt, synthetic construct
  source 1..20: mol_type = other RNA
acctcgtgcggcccgggagc

SEQ ID NO: 2976 - RNA, 20 nt, synthetic construct
  source 1..20: mol_type = other RNA
acctttgtgcccttccagag

SEQ ID NO: 2977 - RNA, 20 nt, synthetic construct
  source 1..20: mol_type = other RNA
acgacaccaaccaccagggt

SEQ ID NO: 2978 - RNA, 20 nt, synthetic construct
  source 1..20: mol_type = other RNA
acgaggtaacgtcatcccag

SEQ ID NO: 2979 - RNA, 20 nt, synthetic construct
  source 1..20: mol_type = other RNA
acggccaggacccagactag

SEQ ID NO: 2980 - RNA, 20 nt, synthetic construct
  source 1..20: mol_type = other RNA
acgtcatcccagcccctcgg

SEQ ID NO: 2981 - RNA, 20 nt, synthetic construct
  source 1..20: mol_type = other RNA
acgttacctcgtgcggcccg

SEQ ID NO: 2982 - RNA, 20 nt, synthetic construct
  source 1..20: mol_type = other RNA
actagcagcaccaggctgcc

SEQ ID NO: 2983 - RNA, 20 nt, synthetic construct
  source 1..20: mol_type = other RNA
actggccggctggcctgggt

SEQ ID NO: 2984 - RNA, 20 nt, synthetic construct
  source 1..20: mol_type = other RNA
acttctgcccttctctctgg

SEQ ID NO: 2985 - RNA, 20 nt, synthetic construct
  source 1..20: mol_type = other RNA
agaagggcagaagtgcccac

SEQ ID NO: 2986 - RNA, 20 nt, synthetic construct
  source 1..20: mol_type = other RNA
agaagtgcccacagcccacc

SEQ ID NO: 2987 - RNA, 20 nt, synthetic construct
  source 1..20: mol_type = other RNA
agactagcagcaccaggctg

SEQ ID NO: 2988 - RNA, 20 nt, synthetic construct
  source 1..20: mol_type = other RNA
agagaagggcagaagtgccc

SEQ ID NO: 2989 - RNA, 20 nt, synthetic construct
  source 1..20: mol_type = other RNA
agagagaagggcagaagtgc

SEQ ID NO: 2990 - RNA, 20 nt, synthetic construct
  source 1..20: mol_type = other RNA
agatgacggccaggacccag

SEQ ID NO: 2991 - RNA, 20 nt, synthetic construct
  source 1..20: mol_type = other RNA
agcaccaggctgcccagcag

SEQ ID NO: 2992 - RNA, 20 nt, synthetic construct
  source 1..20: mol_type = other RNA
agcagatgacggccaggacc

SEQ ID NO: 2993 - RNA, 20 nt, synthetic construct
  source 1..20: mol_type = other RNA
agcagcaccaggctgcccag

SEQ ID NO: 2994 - RNA, 20 nt, synthetic construct
  source 1..20: mol_type = other RNA
agcaggccgcccacgacacc

SEQ ID NO: 2995 - RNA, 20 nt, synthetic construct
  source 1..20: mol_type = other RNA
agcccaccccagcccctcac

SEQ ID NO: 2996 - RNA, 20 nt, synthetic construct
  source 1..20: mol_type = other RNA
agcccctcacccaggccagc

SEQ ID NO: 2997 - RNA, 20 nt, synthetic construct
  source 1..20: mol_type = other RNA
agccggccagttccaaaccc

SEQ ID NO: 2998 - RNA, 20 nt, synthetic construct
  source 1..20: mol_type = other RNA
agcctggtgctgctagtctg

SEQ ID NO: 2999 - RNA, 20 nt, synthetic construct
  source 1..20: mol_type = other RNA
aggacccagactagcagcac

SEQ ID NO: 3000 - RNA, 20 nt, synthetic construct
  source 1..20: mol_type = other RNA
aggccagccggccagttcca

SEQ ID NO: 3001 - RNA, 20 nt, synthetic construct
  source 1..20: mol_type = other RNA
aggccgaggggctgggatga

SEQ ID NO: 3002 - RNA, 20 nt, synthetic construct
  source 1..20: mol_type = other RNA
aggccgcccacgacaccaac

SEQ ID NO: 3003 - RNA, 20 nt, synthetic construct
  source 1..20: mol_type = other RNA
aggctgcccagcaggccgcc

SEQ ID NO: 3004 - RNA, 20 nt, synthetic construct
  source 1..20: mol_type = other RNA
agggcacaaaggtcaggggt

SEQ ID NO: 3005 - RNA, 20 nt, synthetic construct
  source 1..20: mol_type = other RNA
agggcagaagtgcccacagc

SEQ ID NO: 3006 - RNA, 20 nt, synthetic construct
  source 1..20: mol_type = other RNA
agggcaggccgaggggctgg

SEQ ID NO: 3007 - RNA, 20 nt, synthetic construct
  source 1..20: mol_type = other RNA
agggcagggcaggccgaggg

SEQ ID NO: 3008 - RNA, 20 nt, synthetic construct
  source 1..20: mol_type = other RNA
aggggctgggatgacgttac

SEQ ID NO: 3009 - RNA, 20 nt, synthetic construct
  source 1..20: mol_type = other RNA
aggggctggggtgggctgtg

SEQ ID NO: 3010 - RNA, 20 nt, synthetic construct
  source 1..20: mol_type = other RNA
agggtttggaactggccggc

SEQ ID NO: 3011 - RNA, 20 nt, synthetic construct
  source 1..20: mol_type = other RNA
aggtaacgtcatcccagccc

SEQ ID NO: 3012 - RNA, 20 nt, synthetic construct
  source 1..20: mol_type = other RNA
agtctgggtcctggccgtca

SEQ ID NO: 3013 - RNA, 20 nt, synthetic construct
  source 1..20: mol_type = other RNA
agtgcccacagcccacccca

SEQ ID NO: 3014 - RNA, 20 nt, synthetic construct
  source 1..20: mol_type = other RNA
agttccaaaccctggtggtt

SEQ ID NO: 3015 - RNA, 20 nt, synthetic construct
  source 1..20: mol_type = other RNA
atcccagcccctcggcctgc

SEQ ID NO: 3016 - RNA, 20 nt, synthetic construct
  source 1..20: mol_type = other RNA
atctgctcccgggccgcacg

SEQ ID NO: 3017 - RNA, 20 nt, synthetic construct
  source 1..20: mol_type = other RNA
atgacggccaggacccagac

SEQ ID NO: 3018 - RNA, 20 nt, synthetic construct
  source 1..20: mol_type = other RNA
atgacgttacctcgtgcggc

SEQ ID NO: 3019 - RNA, 20 nt, synthetic construct
  source 1..20: mol_type = other RNA
caaaccctggtggttggtgt

SEQ ID NO: 3020 - RNA, 20 nt, synthetic construct
  source 1..20: mol_type = other RNA
caaccaccagggtttggaac

SEQ ID NO: 3021 - RNA, 20 nt, synthetic construct
  source 1..20: mol_type = other RNA
cacaaaggtcaggggttagg

SEQ ID NO: 3022 - RNA, 20 nt, synthetic construct
  source 1..20: mol_type = other RNA
cacagcccaccccagcccct

SEQ ID NO: 3023 - RNA, 20 nt, synthetic construct
  source 1..20: mol_type = other RNA
caccaaccaccagggtttgg

SEQ ID NO: 3024 - RNA, 20 nt, synthetic construct
  source 1..20: mol_type = other RNA
caccaggctgcccagcaggc

SEQ ID NO: 3025 - RNA, 20 nt, synthetic construct
  source 1..20: mol_type = other RNA
caccagggtttggaactggc

SEQ ID NO: 3026 - RNA, 20 nt, synthetic construct
  source 1..20: mol_type = other RNA
cacccaggccagccggccag

SEQ ID NO: 3027 - RNA, 20 nt, synthetic construct
  source 1..20: mol_type = other RNA
caccccagcccctcacccag

SEQ ID NO: 3028 - RNA, 20 nt, synthetic construct
  source 1..20: mol_type = other RNA
cacgacaccaaccaccaggg

SEQ ID NO: 3029 - RNA, 20 nt, synthetic construct
  source 1..20: mol_type = other RNA
cacgaggtaacgtcatccca

SEQ ID NO: 3030 - RNA, 20 nt, synthetic construct
  source 1..20: mol_type = other RNA
cacttctgcccttctctctg

SEQ ID NO: 3031 - RNA, 20 nt, synthetic construct
  source 1..20: mol_type = other RNA
cagaagtgcccacagcccac

SEQ ID NO: 3032 - RNA, 20 nt, synthetic construct
  source 1..20: mol_type = other RNA
cagactagcagcaccaggct

SEQ ID NO: 3033 - RNA, 20 nt, synthetic construct
  source 1..20: mol_type = other RNA
cagagagaagggcagaagtg

SEQ ID NO: 3034 - RNA, 20 nt, synthetic construct
  source 1..20: mol_type = other RNA
cagatgacggccaggaccca

SEQ ID NO: 3035 - RNA, 20 nt, synthetic construct
  source 1..20: mol_type = other RNA
cagcaccaggctgcccagca

SEQ ID NO: 3036 - RNA, 20 nt, synthetic construct
  source 1..20: mol_type = other RNA
cagcaggccgcccacgacac

SEQ ID NO: 3037 - RNA, 20 nt, synthetic construct
  source 1..20: mol_type = other RNA
cagcccaccccagcccctca

SEQ ID NO: 3038 - RNA, 20 nt, synthetic construct
  source 1..20: mol_type = other RNA
cagcccctcacccaggccag

SEQ ID NO: 3039 - RNA, 20 nt, synthetic construct
  source 1..20: mol_type = other RNA
cagccggccagttccaaacc

SEQ ID NO: 3040 - RNA, 20 nt, synthetic construct
  source 1..20: mol_type = other RNA
cagcctggtgctgctagtct

SEQ ID NO: 3041 - RNA, 20 nt, synthetic construct
  source 1..20: mol_type = other RNA
caggacccagactagcagca

SEQ ID NO: 3042 - RNA, 20 nt, synthetic construct
  source 1..20: mol_type = other RNA
caggccagccggccagttcc

SEQ ID NO: 3043 - RNA, 20 nt, synthetic construct
  source 1..20: mol_type = other RNA
caggccgaggggctgggatg

SEQ ID NO: 3044 - RNA, 20 nt, synthetic construct
  source 1..20: mol_type = other RNA
caggccgcccacgacaccaa

SEQ ID NO: 3045 - RNA, 20 nt, synthetic construct
  source 1..20: mol_type = other RNA
caggctgcccagcaggccgc

SEQ ID NO: 3046 - RNA, 20 nt, synthetic construct
  source 1..20: mol_type = other RNA
cagggcaggccgaggggctg

SEQ ID NO: 3047 - RNA, 20 nt, synthetic construct
  source 1..20: mol_type = other RNA
cagggtttggaactggccgg

SEQ ID NO: 3048 - RNA, 20 nt, synthetic construct
  source 1..20: mol_type = other RNA
cagttccaaaccctggtggt

SEQ ID NO: 3049 - RNA, 20 nt, synthetic construct
  source 1..20: mol_type = other RNA
catcccagcccctcggcctg

SEQ ID NO: 3050 - RNA, 20 nt, synthetic construct
  source 1..20: mol_type = other RNA
catctgctcccgggccgcac

SEQ ID NO: 3051 - RNA, 20 nt, synthetic construct
  source 1..20: mol_type = other RNA
ccaaaccctggtggttggtg

SEQ ID NO: 3052 - RNA, 20 nt, synthetic construct
  source 1..20: mol_type = other RNA
ccaaccaccagggtttggaa

SEQ ID NO: 3053 - RNA, 20 nt, synthetic construct
  source 1..20: mol_type = other RNA
ccacagcccaccccagcccc

SEQ ID NO: 3054 - RNA, 20 nt, synthetic construct
  source 1..20: mol_type = other RNA
ccaccagggtttggaactgg

SEQ ID NO: 3055 - RNA, 20 nt, synthetic construct
  source 1..20: mol_type = other RNA
ccaccccagcccctcaccca

SEQ ID NO: 3056 - RNA, 20 nt, synthetic construct
  source 1..20: mol_type = other RNA
ccacgacaccaaccaccagg

SEQ ID NO: 3057 - RNA, 20 nt, synthetic construct
  source 1..20: mol_type = other RNA
ccagactagcagcaccaggc

SEQ ID NO: 3058 - RNA, 20 nt, synthetic construct
  source 1..20: mol_type = other RNA
ccagagagaagggcagaagt

SEQ ID NO: 3059 - RNA, 20 nt, synthetic construct
  source 1..20: mol_type = other RNA
ccagcaggccgcccacgaca

SEQ ID NO: 3060 - RNA, 20 nt, synthetic construct
  source 1..20: mol_type = other RNA
ccagcccctcacccaggcca

SEQ ID NO: 3061 - RNA, 20 nt, synthetic construct
  source 1..20: mol_type = other RNA
ccagcccctcggcctgccct

SEQ ID NO: 3062 - RNA, 20 nt, synthetic construct
  source 1..20: mol_type = other RNA
ccagccggccagttccaaac

SEQ ID NO: 3063 - RNA, 20 nt, synthetic construct
  source 1..20: mol_type = other RNA
ccaggacccagactagcagc

SEQ ID NO: 3064 - RNA, 20 nt, synthetic construct
  source 1..20: mol_type = other RNA
ccaggccagccggccagttc

SEQ ID NO: 3065 - RNA, 20 nt, synthetic construct
  source 1..20: mol_type = other RNA
ccaggctgcccagcaggccg

SEQ ID NO: 3066 - RNA, 20 nt, synthetic construct
  source 1..20: mol_type = other RNA
ccagggtttggaactggccg

SEQ ID NO: 3067 - RNA, 20 nt, synthetic construct
  source 1..20: mol_type = other RNA
ccagttccaaaccctggtgg

SEQ ID NO: 3068 - RNA, 20 nt, synthetic construct
  source 1..20: mol_type = other RNA
cccacagcccaccccagccc

SEQ ID NO: 3069 - RNA, 20 nt, synthetic construct
  source 1..20: mol_type = other RNA
cccaccccagcccctcaccc

SEQ ID NO: 3070 - RNA, 20 nt, synthetic construct
  source 1..20: mol_type = other RNA
cccacgacaccaaccaccag

SEQ ID NO: 3071 - RNA, 20 nt, synthetic construct
  source 1..20: mol_type = other RNA
cccagactagcagcaccagg

SEQ ID NO: 3072 - RNA, 20 nt, synthetic construct
  source 1..20: mol_type = other RNA
cccagcaggccgcccacgac

SEQ ID NO: 3073 - RNA, 20 nt, synthetic construct
  source 1..20: mol_type = other RNA
cccagcccctcacccaggcc

SEQ ID NO: 3074 - RNA, 20 nt, synthetic construct
  source 1..20: mol_type = other RNA
cccaggccagccggccagtt

SEQ ID NO: 3075 - RNA, 20 nt, synthetic construct
  source 1..20: mol_type = other RNA
ccccagcccctcacccaggc

SEQ ID NO: 3076 - RNA, 20 nt, synthetic construct
  source 1..20: mol_type = other RNA
ccccgtcctaacccctgacc

SEQ ID NO: 3077 - RNA, 20 nt, synthetic construct
  source 1..20: mol_type = other RNA
cccctcacccaggccagccg

SEQ ID NO: 3078 - RNA, 20 nt, synthetic construct
  source 1..20: mol_type = other RNA
cccctgacctttgtgccctt

SEQ ID NO: 3079 - RNA, 20 nt, synthetic construct
  source 1..20: mol_type = other RNA
cccgggagcagatgacggcc

SEQ ID NO: 3080 - RNA, 20 nt, synthetic construct
  source 1..20: mol_type = other RNA
cccgggccgcacgaggtaac

SEQ ID NO: 3081 - RNA, 20 nt, synthetic construct
  source 1..20: mol_type = other RNA
cccgtcctaacccctgacct

SEQ ID NO: 3082 - RNA, 20 nt, synthetic construct
  source 1..20: mol_type = other RNA
ccctcacccaggccagccgg

SEQ ID NO: 3083 - RNA, 20 nt, synthetic construct
  source 1..20: mol_type = other RNA
ccctgacctttgtgcccttc

SEQ ID NO: 3084 - RNA, 20 nt, synthetic construct
  source 1..20: mol_type = other RNA
ccctggtggttggtgtcgtg

SEQ ID NO: 3085 - RNA, 20 nt, synthetic construct
  source 1..20: mol_type = other RNA
cccttccagagagaagggca

SEQ ID NO: 3086 - RNA, 20 nt, synthetic construct
  source 1..20: mol_type = other RNA
cccttctctctggaagggca

SEQ ID NO: 3087 - RNA, 20 nt, synthetic construct
  source 1..20: mol_type = other RNA
ccgaggggctgggatgacgt

SEQ ID NO: 3088 - RNA, 20 nt, synthetic construct
  source 1..20: mol_type = other RNA
ccgcacgaggtaacgtcatc

SEQ ID NO: 3089 - RNA, 20 nt, synthetic construct
  source 1..20: mol_type = other RNA
ccgcccacgacaccaaccac

SEQ ID NO: 3090 - RNA, 20 nt, synthetic construct
  source 1..20: mol_type = other RNA
ccggccagttccaaaccctg

SEQ ID NO: 3091 - RNA, 20 nt, synthetic construct
  source 1..20: mol_type = other RNA
ccggctggcctgggtgaggg

SEQ ID NO: 3092 - RNA, 20 nt, synthetic construct
  source 1..20: mol_type = other RNA
ccgggagcagatgacggcca

SEQ ID NO: 3093 - RNA, 20 nt, synthetic construct
  source 1..20: mol_type = other RNA
ccgggccgcacgaggtaacg

SEQ ID NO: 3094 - RNA, 20 nt, synthetic construct
  source 1..20: mol_type = other RNA
ccgtcatctgctcccgggcc

SEQ ID NO: 3095 - RNA, 20 nt, synthetic construct
  source 1..20: mol_type = other RNA
ccgtcctaacccctgacctt

SEQ ID NO: 3096 - RNA, 20 nt, synthetic construct
  source 1..20: mol_type = other RNA
cctaacccctgacctttgtg

SEQ ID NO: 3097 - RNA, 20 nt, synthetic construct
  source 1..20: mol_type = other RNA
cctcacccaggccagccggc

SEQ ID NO: 3098 - RNA, 20 nt, synthetic construct
  source 1..20: mol_type = other RNA
cctcgtgcggcccgggagca

SEQ ID NO: 3099 - RNA, 20 nt, synthetic construct
  source 1..20: mol_type = other RNA
cctgacctttgtgcccttcc

SEQ ID NO: 3100 - RNA, 20 nt, synthetic construct
  source 1..20: mol_type = other RNA
cctgctgggcagcctggtgc

SEQ ID NO: 3101 - RNA, 20 nt, synthetic construct
  source 1..20: mol_type = other RNA
cctggccgtcatctgctccc

SEQ ID NO: 3102 - RNA, 20 nt, synthetic construct
  source 1..20: mol_type = other RNA
cctgggtgaggggctggggt

SEQ ID NO: 3103 - RNA, 20 nt, synthetic construct
  source 1..20: mol_type = other RNA
cctggtgctgctagtctggg

SEQ ID NO: 3104 - RNA, 20 nt, synthetic construct
  source 1..20: mol_type = other RNA
cctggtggttggtgtcgtgg

SEQ ID NO: 3105 - RNA, 20 nt, synthetic construct
  source 1..20: mol_type = other RNA
ccttccagagagaagggcag

SEQ ID NO: 3106 - RNA, 20 nt, synthetic construct
  source 1..20: mol_type = other RNA
ccttctctctggaagggcac

SEQ ID NO: 3107 - RNA, 20 nt, synthetic construct
  source 1..20: mol_type = other RNA
cctttgtgcccttccagaga

SEQ ID NO: 3108 - RNA, 20 nt, synthetic construct
  source 1..20: mol_type = other RNA
cgacaccaaccaccagggtt

SEQ ID NO: 3109 - RNA, 20 nt, synthetic construct
  source 1..20: mol_type = other RNA
cgaggggctgggatgacgtt

SEQ ID NO: 3110 - RNA, 20 nt, synthetic construct
  source 1..20: mol_type = other RNA
cgaggtaacgtcatcccagc

SEQ ID NO: 3111 - RNA, 20 nt, synthetic construct
  source 1..20: mol_type = other RNA
cgcacgaggtaacgtcatcc

SEQ ID NO: 3112 - RNA, 20 nt, synthetic construct
  source 1..20: mol_type = other RNA
cgcccacgacaccaaccacc

SEQ ID NO: 3113 - RNA, 20 nt, synthetic construct
  source 1..20: mol_type = other RNA
cggccaggacccagactagc

SEQ ID NO: 3114 - RNA, 20 nt, synthetic construct
  source 1..20: mol_type = other RNA
cggccagttccaaaccctgg

SEQ ID NO: 3115 - RNA, 20 nt, synthetic construct
  source 1..20: mol_type = other RNA
cggcccgggagcagatgacg

SEQ ID NO: 3116 - RNA, 20 nt, synthetic construct
  source 1..20: mol_type = other RNA
cggcctgctgggcagcctgg

SEQ ID NO: 3117 - RNA, 20 nt, synthetic construct
  source 1..20: mol_type = other RNA
cggctggcctgggtgagggg

SEQ ID NO: 3118 - RNA, 20 nt, synthetic construct
  source 1..20: mol_type = other RNA
cgggagcagatgacggccag

SEQ ID NO: 3119 - RNA, 20 nt, synthetic construct
  source 1..20: mol_type = other RNA
cgggccgcacgaggtaacgt

SEQ ID NO: 3120 - RNA, 20 nt, synthetic construct
  source 1..20: mol_type = other RNA
cgtcatcccagcccctcggc

SEQ ID NO: 3121 - RNA, 20 nt, synthetic construct
  source 1..20: mol_type = other RNA
cgtcatctgctcccgggccg

SEQ ID NO: 3122 - RNA, 20 nt, synthetic construct
  source 1..20: mol_type = other RNA
cgtcctaacccctgaccttt

SEQ ID NO: 3123 - RNA, 20 nt, synthetic construct
  source 1..20: mol_type = other RNA
cgtgcggcccgggagcagat

SEQ ID NO: 3124 - RNA, 20 nt, synthetic construct
  source 1..20: mol_type = other RNA
cgtgggcggcctgctgggca

SEQ ID NO: 3125 - RNA, 20 nt, synthetic construct
  source 1..20: mol_type = other RNA
cgttacctcgtgcggcccgg

SEQ ID NO: 3126 - RNA, 20 nt, synthetic construct
  source 1..20: mol_type = other RNA
ctaacccctgacctttgtgc

SEQ ID NO: 3127 - RNA, 20 nt, synthetic construct
  source 1..20: mol_type = other RNA
ctagcagcaccaggctgccc

SEQ ID NO: 3128 - RNA, 20 nt, synthetic construct
  source 1..20: mol_type = other RNA
ctagtctgggtcctggccgt

SEQ ID NO: 3129 - RNA, 20 nt, synthetic construct
  source 1..20: mol_type = other RNA
ctcacccaggccagccggcc

SEQ ID NO: 3130 - RNA, 20 nt, synthetic construct
  source 1..20: mol_type = other RNA
ctcccgggccgcacgaggta

SEQ ID NO: 3131 - RNA, 20 nt, synthetic construct
  source 1..20: mol_type = other RNA
ctcgtgcggcccgggagcag

SEQ ID NO: 3132 - RNA, 20 nt, synthetic construct
  source 1..20: mol_type = other RNA
ctctctggaagggcacaaag

SEQ ID NO: 3133 - RNA, 20 nt, synthetic construct
  source 1..20: mol_type = other RNA
ctctggaagggcacaaaggt

SEQ ID NO: 3134 - RNA, 20 nt, synthetic construct
  source 1..20: mol_type = other RNA
ctgacctttgtgcccttcca

SEQ ID NO: 3135 - RNA, 20 nt, synthetic construct
  source 1..20: mol_type = other RNA
ctgcccagcaggccgcccac

SEQ ID NO: 3136 - RNA, 20 nt, synthetic construct
  source 1..20: mol_type = other RNA
ctgcccttctctctggaagg

SEQ ID NO: 3137 - RNA, 20 nt, synthetic construct
  source 1..20: mol_type = other RNA
ctgctagtctgggtcctggc

SEQ ID NO: 3138 - RNA, 20 nt, synthetic construct
  source 1..20: mol_type = other RNA
ctgctcccgggccgcacgag

SEQ ID NO: 3139 - RNA, 20 nt, synthetic construct
  source 1..20: mol_type = other RNA
ctgctgggcagcctggtgct

SEQ ID NO: 3140 - RNA, 20 nt, synthetic construct
  source 1..20: mol_type = other RNA
ctggaagggcacaaaggtca

SEQ ID NO: 3141 - RNA, 20 nt, synthetic construct
  source 1..20: mol_type = other RNA
ctggccggctggcctgggtg

SEQ ID NO: 3142 - RNA, 20 nt, synthetic construct
  source 1..20: mol_type = other RNA
ctggccgtcatctgctcccg

SEQ ID NO: 3143 - RNA, 20 nt, synthetic construct
  source 1..20: mol_type = other RNA
ctggcctgggtgaggggctg

SEQ ID NO: 3144 - RNA, 20 nt, synthetic construct
  source 1..20: mol_type = other RNA
ctgggatgacgttacctcgt

SEQ ID NO: 3145 - RNA, 20 nt, synthetic construct
  source 1..20: mol_type = other RNA
ctgggcagcctggtgctgct

SEQ ID NO: 3146 - RNA, 20 nt, synthetic construct
  source 1..20: mol_type = other RNA
ctggggtgggctgtgggcac

SEQ ID NO: 3147 - RNA, 20 nt, synthetic construct
  source 1..20: mol_type = other RNA
ctgggtcctggccgtcatct

SEQ ID NO: 3148 - RNA, 20 nt, synthetic construct
  source 1..20: mol_type = other RNA
ctgggtgaggggctggggtg

SEQ ID NO: 3149 - RNA, 20 nt, synthetic construct
  source 1..20: mol_type = other RNA
ctggtgctgctagtctgggt

SEQ ID NO: 3150 - RNA, 20 nt, synthetic construct
  source 1..20: mol_type = other RNA
ctggtggttggtgtcgtggg

SEQ ID NO: 3151 - RNA, 20 nt, synthetic construct
  source 1..20: mol_type = other RNA
ctgtgggcacttctgccctt

SEQ ID NO: 3152 - RNA, 20 nt, synthetic construct
  source 1..20: mol_type = other RNA
cttccagagagaagggcaga

SEQ ID NO: 3153 - RNA, 20 nt, synthetic construct
  source 1..20: mol_type = other RNA
cttctctctggaagggcaca

SEQ ID NO: 3154 - RNA, 20 nt, synthetic construct
  source 1..20: mol_type = other RNA
cttctgcccttctctctgga

SEQ ID NO: 3155 - RNA, 20 nt, synthetic construct
  source 1..20: mol_type = other RNA
ctttgtgcccttccagagag

SEQ ID NO: 3156 - RNA, 20 nt, synthetic construct
  source 1..20: mol_type = other RNA
gaactggccggctggcctgg

SEQ ID NO: 3157 - RNA, 20 nt, synthetic construct
  source 1..20: mol_type = other RNA
gaagggcacaaaggtcaggg

SEQ ID NO: 3158 - RNA, 20 nt, synthetic construct
  source 1..20: mol_type = other RNA
gaagggcagaagtgcccaca

SEQ ID NO: 3159 - RNA, 20 nt, synthetic construct
  source 1..20: mol_type = other RNA
gaagtgcccacagcccaccc

SEQ ID NO: 3160 - RNA, 20 nt, synthetic construct
  source 1..20: mol_type = other RNA
gacaccaaccaccagggttt

SEQ ID NO: 3161 - RNA, 20 nt, synthetic construct
  source 1..20: mol_type = other RNA
gacccagactagcagcacca

SEQ ID NO: 3162 - RNA, 20 nt, synthetic construct
  source 1..20: mol_type = other RNA
gaccccgtcctaacccctga

SEQ ID NO: 3163 - RNA, 20 nt, synthetic construct
  source 1..20: mol_type = other RNA
gacctttgtgcccttccaga

SEQ ID NO: 3164 - RNA, 20 nt, synthetic construct
  source 1..20: mol_type = other RNA
gacggccaggacccagacta

SEQ ID NO: 3165 - RNA, 20 nt, synthetic construct
  source 1..20: mol_type = other RNA
gacgttacctcgtgcggccc

SEQ ID NO: 3166 - RNA, 20 nt, synthetic construct
  source 1..20: mol_type = other RNA
gactagcagcaccaggctgc

SEQ ID NO: 3167 - RNA, 20 nt, synthetic construct
  source 1..20: mol_type = other RNA
gagaagggcagaagtgccca

SEQ ID NO: 3168 - RNA, 20 nt, synthetic construct
  source 1..20: mol_type = other RNA
gagagaagggcagaagtgcc

SEQ ID NO: 3169 - RNA, 20 nt, synthetic construct
  source 1..20: mol_type = other RNA
gagcagatgacggccaggac

SEQ ID NO: 3170 - RNA, 20 nt, synthetic construct
  source 1..20: mol_type = other RNA
gaggggctgggatgacgtta

SEQ ID NO: 3171 - RNA, 20 nt, synthetic construct
  source 1..20: mol_type = other RNA
gaggggctggggtgggctgt

SEQ ID NO: 3172 - RNA, 20 nt, synthetic construct
  source 1..20: mol_type = other RNA
gaggtaacgtcatcccagcc

SEQ ID NO: 3173 - RNA, 20 nt, synthetic construct
  source 1..20: mol_type = other RNA
gatgacggccaggacccaga

SEQ ID NO: 3174 - RNA, 20 nt, synthetic construct
  source 1..20: mol_type = other RNA
gatgacgttacctcgtgcgg

SEQ ID NO: 3175 - RNA, 20 nt, synthetic construct
  source 1..20: mol_type = other RNA
gcacaaaggtcaggggttag

SEQ ID NO: 3176 - RNA, 20 nt, synthetic construct
  source 1..20: mol_type = other RNA
gcaccaggctgcccagcagg

SEQ ID NO: 3177 - RNA, 20 nt, synthetic construct
  source 1..20: mol_type = other RNA
gcacgaggtaacgtcatccc

SEQ ID NO: 3178 - RNA, 20 nt, synthetic construct
  source 1..20: mol_type = other RNA
gcacttctgcccttctctct

SEQ ID NO: 3179 - RNA, 20 nt, synthetic construct
  source 1..20: mol_type = other RNA
gcagaagtgcccacagccca

SEQ ID NO: 3180 - RNA, 20 nt, synthetic construct
  source 1..20: mol_type = other RNA
gcagatgacggccaggaccc

SEQ ID NO: 3181 - RNA, 20 nt, synthetic construct
  source 1..20: mol_type = other RNA
gcagcaccaggctgcccagc

SEQ ID NO: 3182 - RNA, 20 nt, synthetic construct
  source 1..20: mol_type = other RNA
gcagcctggtgctgctagtc

SEQ ID NO: 3183 - RNA, 20 nt, synthetic construct
  source 1..20: mol_type = other RNA
gcaggccgaggggctgggat

SEQ ID NO: 3184 - RNA, 20 nt, synthetic construct
  source 1..20: mol_type = other RNA
gcaggccgcccacgacacca

SEQ ID NO: 3185 - RNA, 20 nt, synthetic construct
  source 1..20: mol_type = other RNA
gcagggcaggccgaggggct

SEQ ID NO: 3186 - RNA, 20 nt, synthetic construct
  source 1..20: mol_type = other RNA
gccagccggccagttccaaa

SEQ ID NO: 3187 - RNA, 20 nt, synthetic construct
  source 1..20: mol_type = other RNA
gccaggacccagactagcag

SEQ ID NO: 3188 - RNA, 20 nt, synthetic construct
  source 1..20: mol_type = other RNA
gccagttccaaaccctggtg

SEQ ID NO: 3189 - RNA, 20 nt, synthetic construct
  source 1..20: mol_type = other RNA
gcccacagcccaccccagcc

SEQ ID NO: 3190 - RNA, 20 nt, synthetic construct
  source 1..20: mol_type = other RNA
gcccaccccagcccctcacc

SEQ ID NO: 3191 - RNA, 20 nt, synthetic construct
  source 1..20: mol_type = other RNA
gcccacgacaccaaccacca

SEQ ID NO: 3192 - RNA, 20 nt, synthetic construct
  source 1..20: mol_type = other RNA
gcccagcaggccgcccacga

SEQ ID NO: 3193 - RNA, 20 nt, synthetic construct
  source 1..20: mol_type = other RNA
gcccctcacccaggccagcc

SEQ ID NO: 3194 - RNA, 20 nt, synthetic construct
  source 1..20: mol_type = other RNA
gcccgggagcagatgacggc

SEQ ID NO: 3195 - RNA, 20 nt, synthetic construct
  source 1..20: mol_type = other RNA
gcccttccagagagaagggc

SEQ ID NO: 3196 - RNA, 20 nt, synthetic construct
  source 1..20: mol_type = other RNA
gcccttctctctggaagggc

SEQ ID NO: 3197 - RNA, 20 nt, synthetic construct
  source 1..20: mol_type = other RNA
gccgaggggctgggatgacg

SEQ ID NO: 3198 - RNA, 20 nt, synthetic construct
  source 1..20: mol_type = other RNA
gccgcacgaggtaacgtcat

SEQ ID NO: 3199 - RNA, 20 nt, synthetic construct
  source 1..20: mol_type = other RNA
gccgcccacgacaccaacca

SEQ ID NO: 3200 - RNA, 20 nt, synthetic construct
  source 1..20: mol_type = other RNA
gccggccagttccaaaccct

SEQ ID NO: 3201 - RNA, 20 nt, synthetic construct
  source 1..20: mol_type = other RNA
gccggctggcctgggtgagg

SEQ ID NO: 3202 - RNA, 20 nt, synthetic construct
  source 1..20: mol_type = other RNA
gccgtcatctgctcccgggc

SEQ ID NO: 3203 - RNA, 20 nt, synthetic construct
  source 1..20: mol_type = other RNA
gcctgctgggcagcctggtg

SEQ ID NO: 3204 - RNA, 20 nt, synthetic construct
  source 1..20: mol_type = other RNA
gcctgggtgaggggctgggg

SEQ ID NO: 3205 - RNA, 20 nt, synthetic construct
  source 1..20: mol_type = other RNA
gcctggtgctgctagtctgg

SEQ ID NO: 3206 - RNA, 20 nt, synthetic construct
  source 1..20: mol_type = other RNA
gcggcccgggagcagatgac

SEQ ID NO: 3207 - RNA, 20 nt, synthetic construct
  source 1..20: mol_type = other RNA
gcggcctgctgggcagcctg

SEQ ID NO: 3208 - RNA, 20 nt, synthetic construct
  source 1..20: mol_type = other RNA
gctagtctgggtcctggccg

SEQ ID NO: 3209 - RNA, 20 nt, synthetic construct
  source 1..20: mol_type = other RNA
gctcccgggccgcacgaggt

SEQ ID NO: 3210 - RNA, 20 nt, synthetic construct
  source 1..20: mol_type = other RNA
gctgcccagcaggccgccca

SEQ ID NO: 3211 - RNA, 20 nt, synthetic construct
  source 1..20: mol_type = other RNA
gctgctagtctgggtcctgg

SEQ ID NO: 3212 - RNA, 20 nt, synthetic construct
  source 1..20: mol_type = other RNA
gctggcctgggtgaggggct

SEQ ID NO: 3213 - RNA, 20 nt, synthetic construct
  source 1..20: mol_type = other RNA
gctgggatgacgttacctcg

SEQ ID NO: 3214 - RNA, 20 nt, synthetic construct
  source 1..20: mol_type = other RNA
gctgggcagcctggtgctgc

SEQ ID NO: 3215 - RNA, 20 nt, synthetic construct
  source 1..20: mol_type = other RNA
gctggggtgggctgtgggca

SEQ ID NO: 3216 - RNA, 20 nt, synthetic construct
  source 1..20: mol_type = other RNA
gctgtgggcacttctgccct

SEQ ID NO: 3217 - RNA, 20 nt, synthetic construct
  source 1..20: mol_type = other RNA
ggaactggccggctggcctg

SEQ ID NO: 3218 - RNA, 20 nt, synthetic construct
  source 1..20: mol_type = other RNA
ggaagggcacaaaggtcagg

SEQ ID NO: 3219 - RNA, 20 nt, synthetic construct
  source 1..20: mol_type = other RNA
ggacccagactagcagcacc

SEQ ID NO: 3220 - RNA, 20 nt, synthetic construct
  source 1..20: mol_type = other RNA
ggagcagatgacggccagga

SEQ ID NO: 3221 - RNA, 20 nt, synthetic construct
  source 1..20: mol_type = other RNA
ggatgacgttacctcgtgcg

SEQ ID NO: 3222 - RNA, 20 nt, synthetic construct
  source 1..20: mol_type = other RNA
ggcacaaaggtcaggggtta

SEQ ID NO: 3223 - RNA, 20 nt, synthetic construct
  source 1..20: mol_type = other RNA
ggcacttctgcccttctctc

SEQ ID NO: 3224 - RNA, 20 nt, synthetic construct
  source 1..20: mol_type = other RNA
ggcagaagtgcccacagccc

SEQ ID NO: 3225 - RNA, 20 nt, synthetic construct
  source 1..20: mol_type = other RNA
ggcagcctggtgctgctagt

SEQ ID NO: 3226 - RNA, 20 nt, synthetic construct
  source 1..20: mol_type = other RNA
ggcaggccgaggggctggga

SEQ ID NO: 3227 - RNA, 20 nt, synthetic construct
  source 1..20: mol_type = other RNA
ggccagccggccagttccaa

SEQ ID NO: 3228 - RNA, 20 nt, synthetic construct
  source 1..20: mol_type = other RNA
ggccaggacccagactagca

SEQ ID NO: 3229 - RNA, 20 nt, synthetic construct
  source 1..20: mol_type = other RNA
ggccagttccaaaccctggt

SEQ ID NO: 3230 - RNA, 20 nt, synthetic construct
  source 1..20: mol_type = other RNA
ggcccgggagcagatgacgg

SEQ ID NO: 3231 - RNA, 20 nt, synthetic construct
  source 1..20: mol_type = other RNA
ggccgaggggctgggatgac

SEQ ID NO: 3232 - RNA, 20 nt, synthetic construct
  source 1..20: mol_type = other RNA
ggccgcacgaggtaacgtca

SEQ ID NO: 3233 - RNA, 20 nt, synthetic construct
  source 1..20: mol_type = other RNA
ggccgcccacgacaccaacc

SEQ ID NO: 3234 - RNA, 20 nt, synthetic construct
  source 1..20: mol_type = other RNA
ggccggctggcctgggtgag

SEQ ID NO: 3235 - RNA, 20 nt, synthetic construct
  source 1..20: mol_type = other RNA
ggccgtcatctgctcccggg

SEQ ID NO: 3236 - RNA, 20 nt, synthetic construct
  source 1..20: mol_type = other RNA
ggcctgctgggcagcctggt

SEQ ID NO: 3237 - RNA, 20 nt, synthetic construct
  source 1..20: mol_type = other RNA
ggcctgggtgaggggctggg

SEQ ID NO: 3238 - RNA, 20 nt, synthetic construct
  source 1..20: mol_type = other RNA
ggcggcctgctgggcagcct

SEQ ID NO: 3239 - RNA, 20 nt, synthetic construct
  source 1..20: mol_type = other RNA
ggctggcctgggtgaggggc

SEQ ID NO: 3240 - RNA, 20 nt, synthetic construct
  source 1..20: mol_type = other RNA
ggctgggatgacgttacctc

SEQ ID NO: 3241 - RNA, 20 nt, synthetic construct
  source 1..20: mol_type = other RNA
ggctggggtgggctgtgggc

SEQ ID NO: 3242 - RNA, 20 nt, synthetic construct
  source 1..20: mol_type = other RNA
ggctgtgggcacttctgccc

SEQ ID NO: 3243 - RNA, 20 nt, synthetic construct
  source 1..20: mol_type = other RNA
gggagcagatgacggccagg

SEQ ID NO: 3244 - RNA, 20 nt, synthetic construct
  source 1..20: mol_type = other RNA
gggatgacgttacctcgtgc

SEQ ID NO: 3245 - RNA, 20 nt, synthetic construct
  source 1..20: mol_type = other RNA
gggcacaaaggtcaggggtt

SEQ ID NO: 3246 - RNA, 20 nt, synthetic construct
  source 1..20: mol_type = other RNA
gggcacttctgcccttctct

SEQ ID NO: 3247 - RNA, 20 nt, synthetic construct
  source 1..20: mol_type = other RNA
gggcagaagtgcccacagcc

SEQ ID NO: 3248 - RNA, 20 nt, synthetic construct
  source 1..20: mol_type = other RNA
gggcagcctggtgctgctag

SEQ ID NO: 3249 - RNA, 20 nt, synthetic construct
  source 1..20: mol_type = other RNA
gggccgcacgaggtaacgtc

SEQ ID NO: 3250 - RNA, 20 nt, synthetic construct
  source 1..20: mol_type = other RNA
gggctgggatgacgttacct

SEQ ID NO: 3251 - RNA, 20 nt, synthetic construct
  source 1..20: mol_type = other RNA
gggctggggtgggctgtggg

SEQ ID NO: 3252 - RNA, 20 nt, synthetic construct
  source 1..20: mol_type = other RNA
gggctgtgggcacttctgcc

SEQ ID NO: 3253 - RNA, 20 nt, synthetic construct
  source 1..20: mol_type = other RNA
ggggctgggatgacgttacc

SEQ ID NO: 3254 - RNA, 20 nt, synthetic construct
  source 1..20: mol_type = other RNA
ggggctggggtgggctgtgg

SEQ ID NO: 3255 - RNA, 20 nt, synthetic construct
  source 1..20: mol_type = other RNA
ggggtgggctgtgggcactt

SEQ ID NO: 3256 - RNA, 20 nt, synthetic construct
  source 1..20: mol_type = other RNA
gggtcctggccgtcatctgc

SEQ ID NO: 3257 - RNA, 20 nt, synthetic construct
  source 1..20: mol_type = other RNA
gggtgaggggctggggtggg

SEQ ID NO: 3258 - RNA, 20 nt, synthetic construct
  source 1..20: mol_type = other RNA
gggtgggctgtgggcacttc

SEQ ID NO: 3259 - RNA, 20 nt, synthetic construct
  source 1..20: mol_type = other RNA
gggtttggaactggccggct

SEQ ID NO: 3260 - RNA, 20 nt, synthetic construct
  source 1..20: mol_type = other RNA
ggtaacgtcatcccagcccc

SEQ ID NO: 3261 - RNA, 20 nt, synthetic construct
  source 1..20: mol_type = other RNA
ggtcctggccgtcatctgct

SEQ ID NO: 3262 - RNA, 20 nt, synthetic construct
  source 1..20: mol_type = other RNA
ggtgaggggctggggtgggc

SEQ ID NO: 3263 - RNA, 20 nt, synthetic construct
  source 1..20: mol_type = other RNA
ggtgctgctagtctgggtcc

SEQ ID NO: 3264 - RNA, 20 nt, synthetic construct
  source 1..20: mol_type = other RNA
ggtgggctgtgggcacttct

SEQ ID NO: 3265 - RNA, 20 nt, synthetic construct
  source 1..20: mol_type = other RNA
ggtggttggtgtcgtgggcg

SEQ ID NO: 3266 - RNA, 20 nt, synthetic construct
  source 1..20: mol_type = other RNA
ggtgtcgtgggcggcctgct

SEQ ID NO: 3267 - RNA, 20 nt, synthetic construct
  source 1..20: mol_type = other RNA
ggttggtgtcgtgggcggcc

SEQ ID NO: 3268 - RNA, 20 nt, synthetic construct
  source 1..20: mol_type = other RNA
ggtttggaactggccggctg

SEQ ID NO: 3269 - RNA, 20 nt, synthetic construct
  source 1..20: mol_type = other RNA
gtaacgtcatcccagcccct

SEQ ID NO: 3270 - RNA, 20 nt, synthetic construct
  source 1..20: mol_type = other RNA
gtcatcccagcccctcggcc

SEQ ID NO: 3271 - RNA, 20 nt, synthetic construct
  source 1..20: mol_type = other RNA
gtcatctgctcccgggccgc

SEQ ID NO: 3272 - RNA, 20 nt, synthetic construct
  source 1..20: mol_type = other RNA
gtcctaacccctgacctttg

SEQ ID NO: 3273 - RNA, 20 nt, synthetic construct
  source 1..20: mol_type = other RNA
gtcctggccgtcatctgctc

SEQ ID NO: 3274 - RNA, 20 nt, synthetic construct
  source 1..20: mol_type = other RNA
gtcgtgggcggcctgctggg

SEQ ID NO: 3275 - RNA, 20 nt, synthetic construct
  source 1..20: mol_type = other RNA
gtctgggtcctggccgtcat

SEQ ID NO: 3276 - RNA, 20 nt, synthetic construct
  source 1..20: mol_type = other RNA
gtgaggggctggggtgggct

SEQ ID NO: 3277 - RNA, 20 nt, synthetic construct
  source 1..20: mol_type = other RNA
gtgcccacagcccaccccag

SEQ ID NO: 3278 - RNA, 20 nt, synthetic construct
  source 1..20: mol_type = other RNA
gtgcccttccagagagaagg

SEQ ID NO: 3279 - RNA, 20 nt, synthetic construct
  source 1..20: mol_type = other RNA
gtgcggcccgggagcagatg

SEQ ID NO: 3280 - RNA, 20 nt, synthetic construct
  source 1..20: mol_type = other RNA
gtgctgctagtctgggtcct

SEQ ID NO: 3281 - RNA, 20 nt, synthetic construct
  source 1..20: mol_type = other RNA
gtgggcacttctgcccttct

SEQ ID NO: 3282 - RNA, 20 nt, synthetic construct
  source 1..20: mol_type = other RNA
gtgggcggcctgctgggcag

SEQ ID NO: 3283 - RNA, 20 nt, synthetic construct
  source 1..20: mol_type = other RNA
gtgggctgtgggcacttctg

SEQ ID NO: 3284 - RNA, 20 nt, synthetic construct
  source 1..20: mol_type = other RNA
gtggttggtgtcgtgggcgg

SEQ ID NO: 3285 - RNA, 20 nt, synthetic construct
  source 1..20: mol_type = other RNA
gtgtcgtgggcggcctgctg

SEQ ID NO: 3286 - RNA, 20 nt, synthetic construct
  source 1..20: mol_type = other RNA
gttacctcgtgcggcccggg

SEQ ID NO: 3287 - RNA, 20 nt, synthetic construct
  source 1..20: mol_type = other RNA
gttagggcagggcaggccga

SEQ ID NO: 3288 - RNA, 20 nt, synthetic construct
  source 1..20: mol_type = other RNA
gttccaaaccctggtggttg

SEQ ID NO: 3289 - RNA, 20 nt, synthetic construct
  source 1..20: mol_type = other RNA
gttggtgtcgtgggcggcct

SEQ ID NO: 3290 - RNA, 20 nt, synthetic construct
  source 1..20: mol_type = other RNA
gtttggaactggccggctgg

SEQ ID NO: 3291 - RNA, 20 nt, synthetic construct
  source 1..20: mol_type = other RNA
taacccctgacctttgtgcc

SEQ ID NO: 3292 - RNA, 20 nt, synthetic construct
  source 1..20: mol_type = other RNA
taacgtcatcccagcccctc

SEQ ID NO: 3293 - RNA, 20 nt, synthetic construct
  source 1..20: mol_type = other RNA
tacctcgtgcggcccgggag

SEQ ID NO: 3294 - RNA, 20 nt, synthetic construct
  source 1..20: mol_type = other RNA
tagcagcaccaggctgccca

SEQ ID NO: 3295 - RNA, 20 nt, synthetic construct
  source 1..20: mol_type = other RNA
tagggcagggcaggccgagg

SEQ ID NO: 3296 - RNA, 20 nt, synthetic construct
  source 1..20: mol_type = other RNA
tagtctgggtcctggccgtc

SEQ ID NO: 3297 - RNA, 20 nt, synthetic construct
  source 1..20: mol_type = other RNA
tcacccaggccagccggcca

SEQ ID NO: 3298 - RNA, 20 nt, synthetic construct
  source 1..20: mol_type = other RNA
tcatcccagcccctcggcct

SEQ ID NO: 3299 - RNA, 20 nt, synthetic construct
  source 1..20: mol_type = other RNA
tcatctgctcccgggccgca

SEQ ID NO: 3300 - RNA, 20 nt, synthetic construct
  source 1..20: mol_type = other RNA
tccaaaccctggtggttggt

SEQ ID NO: 3301 - RNA, 20 nt, synthetic construct
  source 1..20: mol_type = other RNA
tccagagagaagggcagaag

SEQ ID NO: 3302 - RNA, 20 nt, synthetic construct
  source 1..20: mol_type = other RNA
tcccagcccctcggcctgcc

SEQ ID NO: 3303 - RNA, 20 nt, synthetic construct
  source 1..20: mol_type = other RNA
tcccgggccgcacgaggtaa

SEQ ID NO: 3304 - RNA, 20 nt, synthetic construct
  source 1..20: mol_type = other RNA
tcctaacccctgacctttgt

SEQ ID NO: 3305 - RNA, 20 nt, synthetic construct
  source 1..20: mol_type = other RNA
tcctggccgtcatctgctcc

SEQ ID NO: 3306 - RNA, 20 nt, synthetic construct
  source 1..20: mol_type = other RNA
tcgtgcggcccgggagcaga

SEQ ID NO: 3307 - RNA, 20 nt, synthetic construct
  source 1..20: mol_type = other RNA
tcgtgggcggcctgctgggc

SEQ ID NO: 3308 - RNA, 20 nt, synthetic construct
  source 1..20: mol_type = other RNA
tctctctggaagggcacaaa

SEQ ID NO: 3309 - RNA, 20 nt, synthetic construct
  source 1..20: mol_type = other RNA
tctctggaagggcacaaagg

SEQ ID NO: 3310 - RNA, 20 nt, synthetic construct
  source 1..20: mol_type = other RNA
tctgcccttctctctggaag

SEQ ID NO: 3311 - RNA, 20 nt, synthetic construct
  source 1..20: mol_type = other RNA
tctgctcccgggccgcacga

SEQ ID NO: 3312 - RNA, 20 nt, synthetic construct
  source 1..20: mol_type = other RNA
tctggaagggcacaaaggtc

SEQ ID NO: 3313 - RNA, 20 nt, synthetic construct
  source 1..20: mol_type = other RNA
tctgggtcctggccgtcatc

SEQ ID NO: 3314 - RNA, 20 nt, synthetic construct
  source 1..20: mol_type = other RNA
tgaccccgtcctaacccctg

SEQ ID NO: 3315 - RNA, 20 nt, synthetic construct
  source 1..20: mol_type = other RNA
tgacctttgtgcccttccag

SEQ ID NO: 3316 - RNA, 20 nt, synthetic construct
  source 1..20: mol_type = other RNA
tgacggccaggacccagact

SEQ ID NO: 3317 - RNA, 20 nt, synthetic construct
  source 1..20: mol_type = other RNA
tgacgttacctcgtgcggcc

SEQ ID NO: 3318 - RNA, 20 nt, synthetic construct
  source 1..20: mol_type = other RNA
tgaggggctggggtgggctg

SEQ ID NO: 3319 - RNA, 20 nt, synthetic construct
  source 1..20: mol_type = other RNA
tgcccacagcccaccccagc

SEQ ID NO: 3320 - RNA, 20 nt, synthetic construct
  source 1..20: mol_type = other RNA
tgcccagcaggccgcccacg

SEQ ID NO: 3321 - RNA, 20 nt, synthetic construct
  source 1..20: mol_type = other RNA
tgcccttccagagagaaggg

SEQ ID NO: 3322 - RNA, 20 nt, synthetic construct
  source 1..20: mol_type = other RNA
tgcccttctctctggaaggg

SEQ ID NO: 3323 - RNA, 20 nt, synthetic construct
  source 1..20: mol_type = other RNA
tgcggcccgggagcagatga

SEQ ID NO: 3324 - RNA, 20 nt, synthetic construct
  source 1..20: mol_type = other RNA
tgctagtctgggtcctggcc

SEQ ID NO: 3325 - RNA, 20 nt, synthetic construct
  source 1..20: mol_type = other RNA
tgctcccgggccgcacgagg

SEQ ID NO: 3326 - RNA, 20 nt, synthetic construct
  source 1..20: mol_type = other RNA
tgctgctagtctgggtcctg

SEQ ID NO: 3327 - RNA, 20 nt, synthetic construct
  source 1..20: mol_type = other RNA
tgctgggcagcctggtgctg

SEQ ID NO: 3328 - RNA, 20 nt, synthetic construct
  source 1..20: mol_type = other RNA
tggaactggccggctggcct

SEQ ID NO: 3329 - RNA, 20 nt, synthetic construct
  source 1..20: mol_type = other RNA
tggaagggcacaaaggtcag

SEQ ID NO: 3330 - RNA, 20 nt, synthetic construct
  source 1..20: mol_type = other RNA
tggccggctggcctgggtga

SEQ ID NO: 3331 - RNA, 20 nt, synthetic construct
  source 1..20: mol_type = other RNA
tggccgtcatctgctcccgg

SEQ ID NO: 3332 - RNA, 20 nt, synthetic construct
  source 1..20: mol_type = other RNA
tggcctgggtgaggggctgg

SEQ ID NO: 3333 - RNA, 20 nt, synthetic construct
  source 1..20: mol_type = other RNA
tgggatgacgttacctcgtg

SEQ ID NO: 3334 - RNA, 20 nt, synthetic construct
  source 1..20: mol_type = other RNA
tgggcacttctgcccttctc

SEQ ID NO: 3335 - RNA, 20 nt, synthetic construct
  source 1..20: mol_type = other RNA
tgggcagcctggtgctgcta

SEQ ID NO: 3336 - RNA, 20 nt, synthetic construct
  source 1..20: mol_type = other RNA
tgggcggcctgctgggcagc

SEQ ID NO: 3337 - RNA, 20 nt, synthetic construct
  source 1..20: mol_type = other RNA
tgggctgtgggcacttctgc

SEQ ID NO: 3338 - RNA, 20 nt, synthetic construct
  source 1..20: mol_type = other RNA
tggggtgggctgtgggcact

SEQ ID NO: 3339 - RNA, 20 nt, synthetic construct
  source 1..20: mol_type = other RNA
tgggtcctggccgtcatctg

SEQ ID NO: 3340 - RNA, 20 nt, synthetic construct
  source 1..20: mol_type = other RNA
tgggtgaggggctggggtgg

SEQ ID NO: 3341 - RNA, 20 nt, synthetic construct
  source 1..20: mol_type = other RNA
tggtgctgctagtctgggtc

SEQ ID NO: 3342 - RNA, 20 nt, synthetic construct
  source 1..20: mol_type = other RNA
tggtggttggtgtcgtgggc

SEQ ID NO: 3343 - RNA, 20 nt, synthetic construct
  source 1..20: mol_type = other RNA
tggtgtcgtgggcggcctgc

SEQ ID NO: 3344 - RNA, 20 nt, synthetic construct
  source 1..20: mol_type = other RNA
tggttggtgtcgtgggcggc

SEQ ID NO: 3345 - RNA, 20 nt, synthetic construct
  source 1..20: mol_type = other RNA
tgtcgtgggcggcctgctgg

SEQ ID NO: 3346 - RNA, 20 nt, synthetic construct
  source 1..20: mol_type = other RNA
tgtgcccttccagagagaag

SEQ ID NO: 3347 - RNA, 20 nt, synthetic construct
  source 1..20: mol_type = other RNA
tgtgggcacttctgcccttc

SEQ ID NO: 3348 - RNA, 20 nt, synthetic construct
  source 1..20: mol_type = other RNA
ttacctcgtgcggcccggga

SEQ ID NO: 3349 - RNA, 20 nt, synthetic construct
  source 1..20: mol_type = other RNA
ttagggcagggcaggccgag

SEQ ID NO: 3350 - RNA, 20 nt, synthetic construct
  source 1..20: mol_type = other RNA
ttccaaaccctggtggttgg

SEQ ID NO: 3351 - RNA, 20 nt, synthetic construct
  source 1..20: mol_type = other RNA
ttccagagagaagggcagaa

SEQ ID NO: 3352 - RNA, 20 nt, synthetic construct
  source 1..20: mol_type = other RNA
ttctctctggaagggcacaa

SEQ ID NO: 3353 - RNA, 20 nt, synthetic construct
  source 1..20: mol_type = other RNA
ttctgcccttctctctggaa

SEQ ID NO: 3354 - RNA, 20 nt, synthetic construct
  source 1..20: mol_type = other RNA
ttggaactggccggctggcc

SEQ ID NO: 3355 - RNA, 20 nt, synthetic construct
  source 1..20: mol_type = other RNA
ttggtgtcgtgggcggcctg

SEQ ID NO: 3356 - RNA, 20 nt, synthetic construct
  source 1..20: mol_type = other RNA
ttgtgcccttccagagagaa

SEQ ID NO: 3357 - RNA, 20 nt, synthetic construct
  source 1..20: mol_type = other RNA
tttggaactggccggctggc

SEQ ID NO: 3358 - RNA, 20 nt, synthetic construct
  source 1..20: mol_type = other RNA
tttgtgcccttccagagaga

SEQ ID NO: 3359 - RNA, 21 nt, synthetic construct
  source 1..21: mol_type = other RNA
aaaccctggtggttggtgtcg

SEQ ID NO: 3360 - RNA, 21 nt, synthetic construct
  source 1..21: mol_type = other RNA
aaccaccagggtttggaactg

SEQ ID NO: 3361 - RNA, 21 nt, synthetic construct
  source 1..21: mol_type = other RNA
aacccctgacctttgtgccct

SEQ ID NO: 3362 - RNA, 21 nt, synthetic construct
  source 1..21: mol_type = other RNA
aaccctggtggttggtgtcgt

SEQ ID NO: 3363 - RNA, 21 nt, synthetic construct
  source 1..21: mol_type = other RNA
aacgtcatcccagcccctcgg

SEQ ID NO: 3364 - RNA, 21 nt, synthetic construct
  source 1..21: mol_type = other RNA
aactggccggctggcctgggt

SEQ ID NO: 3365 - RNA, 21 nt, synthetic construct
  source 1..21: mol_type = other RNA
aagggcacaaaggtcaggggt

SEQ ID NO: 3366 - RNA, 21 nt, synthetic construct
  source 1..21: mol_type = other RNA
aagggcagaagtgcccacagc

SEQ ID NO: 3367 - RNA, 21 nt, synthetic construct
  source 1..21: mol_type = other RNA
aagtgcccacagcccacccca

SEQ ID NO: 3368 - RNA, 21 nt, synthetic construct
  source 1..21: mol_type = other RNA
acaccaaccaccagggtttgg

SEQ ID NO: 3369 - RNA, 21 nt, synthetic construct
  source 1..21: mol_type = other RNA
acagcccaccccagcccctca

SEQ ID NO: 3370 - RNA, 21 nt, synthetic construct
  source 1..21: mol_type = other RNA
accaaccaccagggtttggaa

SEQ ID NO: 3371 - RNA, 21 nt, synthetic construct
  source 1..21: mol_type = other RNA
accaccagggtttggaactgg

SEQ ID NO: 3372 - RNA, 21 nt, synthetic construct
  source 1..21: mol_type = other RNA
accaggctgcccagcaggccg

SEQ ID NO: 3373 - RNA, 21 nt, synthetic construct
  source 1..21: mol_type = other RNA
accagggtttggaactggccg

SEQ ID NO: 3374 - RNA, 21 nt, synthetic construct
  source 1..21: mol_type = other RNA
acccagactagcagcaccagg

SEQ ID NO: 3375 - RNA, 21 nt, synthetic construct
  source 1..21: mol_type = other RNA
acccaggccagccggccagtt

SEQ ID NO: 3376 - RNA, 21 nt, synthetic construct
  source 1..21: mol_type = other RNA
accccagcccctcacccaggc

SEQ ID NO: 3377 - RNA, 21 nt, synthetic construct
  source 1..21: mol_type = other RNA
accccgtcctaacccctgacc

SEQ ID NO: 3378 - RNA, 21 nt, synthetic construct
  source 1..21: mol_type = other RNA
acccctgacctttgtgccctt

SEQ ID NO: 3379 - RNA, 21 nt, synthetic construct
  source 1..21: mol_type = other RNA
accctggtggttggtgtcgtg

SEQ ID NO: 3380 - RNA, 21 nt, synthetic construct
  source 1..21: mol_type = other RNA
acctcgtgcggcccgggagca

SEQ ID NO: 3381 - RNA, 21 nt, synthetic construct
  source 1..21: mol_type = other RNA
acctttgtgcccttccagaga

SEQ ID NO: 3382 - RNA, 21 nt, synthetic construct
  source 1..21: mol_type = other RNA
acgacaccaaccaccagggtt

SEQ ID NO: 3383 - RNA, 21 nt, synthetic construct
  source 1..21: mol_type = other RNA
acgaggtaacgtcatcccagc

SEQ ID NO: 3384 - RNA, 21 nt, synthetic construct
  source 1..21: mol_type = other RNA
acggccaggacccagactagc

SEQ ID NO: 3385 - RNA, 21 nt, synthetic construct
  source 1..21: mol_type = other RNA
acgtcatcccagcccctcggc

SEQ ID NO: 3386 - RNA, 21 nt, synthetic construct
  source 1..21: mol_type = other RNA
acgttacctcgtgcggcccgg

SEQ ID NO: 3387 - RNA, 21 nt, synthetic construct
  source 1..21: mol_type = other RNA
actagcagcaccaggctgccc

SEQ ID NO: 3388 - RNA, 21 nt, synthetic construct
  source 1..21: mol_type = other RNA
actggccggctggcctgggtg

SEQ ID NO: 3389 - RNA, 21 nt, synthetic construct
  source 1..21: mol_type = other RNA
acttctgcccttctctctgga

SEQ ID NO: 3390 - RNA, 21 nt, synthetic construct
  source 1..21: mol_type = other RNA
agaagggcagaagtgcccaca

SEQ ID NO: 3391 - RNA, 21 nt, synthetic construct
  source 1..21: mol_type = other RNA
agaagtgcccacagcccaccc

SEQ ID NO: 3392 - RNA, 21 nt, synthetic construct
  source 1..21: mol_type = other RNA
agactagcagcaccaggctgc

SEQ ID NO: 3393 - RNA, 21 nt, synthetic construct
  source 1..21: mol_type = other RNA
agagaagggcagaagtgccca

SEQ ID NO: 3394 - RNA, 21 nt, synthetic construct
  source 1..21: mol_type = other RNA
agagagaagggcagaagtgcc

SEQ ID NO: 3395 - RNA, 21 nt, synthetic construct
  source 1..21: mol_type = other RNA
agatgacggccaggacccaga

SEQ ID NO: 3396 - RNA, 21 nt, synthetic construct
  source 1..21: mol_type = other RNA
agcaccaggctgcccagcagg

SEQ ID NO: 3397 - RNA, 21 nt, synthetic construct
  source 1..21: mol_type = other RNA
agcagatgacggccaggaccc

SEQ ID NO: 3398 - RNA, 21 nt, synthetic construct
  source 1..21: mol_type = other RNA
agcagcaccaggctgcccagc

SEQ ID NO: 3399 - RNA, 21 nt, synthetic construct
  source 1..21: mol_type = other RNA
agcaggccgcccacgacacca

SEQ ID NO: 3400 - RNA, 21 nt, synthetic construct
  source 1..21: mol_type = other RNA
agcccaccccagcccctcacc

SEQ ID NO: 3401 - RNA, 21 nt, synthetic construct
  source 1..21: mol_type = other RNA
agcccctcacccaggccagcc

SEQ ID NO: 3402 - RNA, 21 nt, synthetic construct
  source 1..21: mol_type = other RNA
agccggccagttccaaaccct

SEQ ID NO: 3403 - RNA, 21 nt, synthetic construct
  source 1..21: mol_type = other RNA
agcctggtgctgctagtctgg

SEQ ID NO: 3404 - RNA, 21 nt, synthetic construct
  source 1..21: mol_type = other RNA
aggacccagactagcagcacc

SEQ ID NO: 3405 - RNA, 21 nt, synthetic construct
  source 1..21: mol_type = other RNA
aggccagccggccagttccaa

SEQ ID NO: 3406 - RNA, 21 nt, synthetic construct
  source 1..21: mol_type = other RNA
aggccgaggggctgggatgac

SEQ ID NO: 3407 - RNA, 21 nt, synthetic construct
  source 1..21: mol_type = other RNA
aggccgcccacgacaccaacc

SEQ ID NO: 3408 - RNA, 21 nt, synthetic construct
  source 1..21: mol_type = other RNA
agggcacaaaggtcaggggtt

SEQ ID NO: 3409 - RNA, 21 nt, synthetic construct
  source 1..21: mol_type = other RNA
agggcagaagtgcccacagcc

SEQ ID NO: 3410 - RNA, 21 nt, synthetic construct
  source 1..21: mol_type = other RNA
aggggctgggatgacgttacc

SEQ ID NO: 3411 - RNA, 21 nt, synthetic construct
  source 1..21: mol_type = other RNA
aggggctggggtgggctgtgg

SEQ ID NO: 3412 - RNA, 21 nt, synthetic construct
  source 1..21: mol_type = other RNA
agggtttggaactggccggct

SEQ ID NO: 3413 - RNA, 21 nt, synthetic construct
  source 1..21: mol_type = other RNA
aggtaacgtcatcccagcccc

SEQ ID NO: 3414 - RNA, 21 nt, synthetic construct
  source 1..21: mol_type = other RNA
agtctgggtcctggccgtcat

SEQ ID NO: 3415 - RNA, 21 nt, synthetic construct
  source 1..21: mol_type = other RNA
agtgcccacagcccaccccag

SEQ ID NO: 3416 - RNA, 21 nt, synthetic construct
  source 1..21: mol_type = other RNA
agttccaaaccctggtggttg

SEQ ID NO: 3417 - RNA, 21 nt, synthetic construct
  source 1..21: mol_type = other RNA
atcccagcccctcggcctgcc

SEQ ID NO: 3418 - RNA, 21 nt, synthetic construct
  source 1..21: mol_type = other RNA
atctgctcccgggccgcacga

SEQ ID NO: 3419 - RNA, 21 nt, synthetic construct
  source 1..21: mol_type = other RNA
atgacggccaggacccagact

SEQ ID NO: 3420 - RNA, 21 nt, synthetic construct
  source 1..21: mol_type = other RNA
atgacgttacctcgtgcggcc

SEQ ID NO: 3421 - RNA, 21 nt, synthetic construct
  source 1..21: mol_type = other RNA
caaaccctggtggttggtgtc

SEQ ID NO: 3422 - RNA, 21 nt, synthetic construct
  source 1..21: mol_type = other RNA
caaccaccagggtttggaact

SEQ ID NO: 3423 - RNA, 21 nt, synthetic construct
  source 1..21: mol_type = other RNA
cacaaaggtcaggggttagga

SEQ ID NO: 3424 - RNA, 21 nt, synthetic construct
  source 1..21: mol_type = other RNA
cacagcccaccccagcccctc

SEQ ID NO: 3425 - RNA, 21 nt, synthetic construct
  source 1..21: mol_type = other RNA
caccaaccaccagggtttgga

SEQ ID NO: 3426 - RNA, 21 nt, synthetic construct
  source 1..21: mol_type = other RNA
caccaggctgcccagcaggcc

SEQ ID NO: 3427 - RNA, 21 nt, synthetic construct
  source 1..21: mol_type = other RNA
caccagggtttggaactggcc

SEQ ID NO: 3428 - RNA, 21 nt, synthetic construct
  source 1..21: mol_type = other RNA
cacccaggccagccggccagt

SEQ ID NO: 3429 - RNA, 21 nt, synthetic construct
  source 1..21: mol_type = other RNA
caccccagcccctcacccagg

SEQ ID NO: 3430 - RNA, 21 nt, synthetic construct
  source 1..21: mol_type = other RNA
cacgacaccaaccaccagggt

SEQ ID NO: 3431 - RNA, 21 nt, synthetic construct
  source 1..21: mol_type = other RNA
cacgaggtaacgtcatcccag

SEQ ID NO: 3432 - RNA, 21 nt, synthetic construct
  source 1..21: mol_type = other RNA
cacttctgcccttctctctgg

SEQ ID NO: 3433 - RNA, 21 nt, synthetic construct
  source 1..21: mol_type = other RNA
cagaagtgcccacagcccacc

SEQ ID NO: 3434 - RNA, 21 nt, synthetic construct
  source 1..21: mol_type = other RNA
cagactagcagcaccaggctg

SEQ ID NO: 3435 - RNA, 21 nt, synthetic construct
  source 1..21: mol_type = other RNA
cagagagaagggcagaagtgc

SEQ ID NO: 3436 - RNA, 21 nt, synthetic construct
  source 1..21: mol_type = other RNA
cagatgacggccaggacccag

SEQ ID NO: 3437 - RNA, 21 nt, synthetic construct
  source 1..21: mol_type = other RNA
cagcaccaggctgcccagcag

SEQ ID NO: 3438 - RNA, 21 nt, synthetic construct
  source 1..21: mol_type = other RNA
cagcaggccgcccacgacacc

SEQ ID NO: 3439 - RNA, 21 nt, synthetic construct
  source 1..21: mol_type = other RNA
cagcccaccccagcccctcac

SEQ ID NO: 3440 - RNA, 21 nt, synthetic construct
  source 1..21: mol_type = other RNA
cagcccctcacccaggccagc

SEQ ID NO: 3441 - RNA, 21 nt, synthetic construct
  source 1..21: mol_type = other RNA
cagccggccagttccaaaccc

SEQ ID NO: 3442 - RNA, 21 nt, synthetic construct
  source 1..21: mol_type = other RNA
cagcctggtgctgctagtctg

SEQ ID NO: 3443 - RNA, 21 nt, synthetic construct
  source 1..21: mol_type = other RNA
caggacccagactagcagcac

SEQ ID NO: 3444 - RNA, 21 nt, synthetic construct
  source 1..21: mol_type = other RNA
caggccagccggccagttcca

SEQ ID NO: 3445 - RNA, 21 nt, synthetic construct
  source 1..21: mol_type = other RNA
caggccgaggggctgggatga

SEQ ID NO: 3446 - RNA, 21 nt, synthetic construct
  source 1..21: mol_type = other RNA
caggccgcccacgacaccaac

SEQ ID NO: 3447 - RNA, 21 nt, synthetic construct
  source 1..21: mol_type = other RNA
cagggtttggaactggccggc

SEQ ID NO: 3448 - RNA, 21 nt, synthetic construct
  source 1..21: mol_type = other RNA
cagttccaaaccctggtggtt

SEQ ID NO: 3449 - RNA, 21 nt, synthetic construct
  source 1..21: mol_type = other RNA
catcccagcccctcggcctgc

SEQ ID NO: 3450 - RNA, 21 nt, synthetic construct
  source 1..21: mol_type = other RNA
catctgctcccgggccgcacg

SEQ ID NO: 3451 - RNA, 21 nt, synthetic construct
  source 1..21: mol_type = other RNA
ccaaaccctggtggttggtgt

SEQ ID NO: 3452 - RNA, 21 nt, synthetic construct
  source 1..21: mol_type = other RNA
ccaaccaccagggtttggaac

SEQ ID NO: 3453 - RNA, 21 nt, synthetic construct
  source 1..21: mol_type = other RNA
ccacagcccaccccagcccct

SEQ ID NO: 3454 - RNA, 21 nt, synthetic construct
  source 1..21: mol_type = other RNA
ccaccagggtttggaactggc

SEQ ID NO: 3455 - RNA, 21 nt, synthetic construct
  source 1..21: mol_type = other RNA
ccaccccagcccctcacccag

SEQ ID NO: 3456 - RNA, 21 nt, synthetic construct
  source 1..21: mol_type = other RNA
ccacgacaccaaccaccaggg

SEQ ID NO: 3457 - RNA, 21 nt, synthetic construct
  source 1..21: mol_type = other RNA
ccagactagcagcaccaggct

SEQ ID NO: 3458 - RNA, 21 nt, synthetic construct
  source 1..21: mol_type = other RNA
ccagagagaagggcagaagtg

SEQ ID NO: 3459 - RNA, 21 nt, synthetic construct
  source 1..21: mol_type = other RNA
ccagcaggccgcccacgacac

SEQ ID NO: 3460 - RNA, 21 nt, synthetic construct
  source 1..21: mol_type = other RNA
ccagcccctcacccaggccag

SEQ ID NO: 3461 - RNA, 21 nt, synthetic construct
  source 1..21: mol_type = other RNA
ccagccggccagttccaaacc

SEQ ID NO: 3462 - RNA, 21 nt, synthetic construct
  source 1..21: mol_type = other RNA
ccaggacccagactagcagca

SEQ ID NO: 3463 - RNA, 21 nt, synthetic construct
  source 1..21: mol_type = other RNA
ccaggccagccggccagttcc

SEQ ID NO: 3464 - RNA, 21 nt, synthetic construct
  source 1..21: mol_type = other RNA
ccagggtttggaactggccgg

SEQ ID NO: 3465 - RNA, 21 nt, synthetic construct
  source 1..21: mol_type = other RNA
ccagttccaaaccctggtggt

SEQ ID NO: 3466 - RNA, 21 nt, synthetic construct
  source 1..21: mol_type = other RNA
cccaccccagcccctcaccca

SEQ ID NO: 3467 - RNA, 21 nt, synthetic construct
  source 1..21: mol_type = other RNA
cccacgacaccaaccaccagg

SEQ ID NO: 3468 - RNA, 21 nt, synthetic construct
  source 1..21: mol_type = other RNA
cccagactagcagcaccaggc

SEQ ID NO: 3469 - RNA, 21 nt, synthetic construct
  source 1..21: mol_type = other RNA
cccagcaggccgcccacgaca

SEQ ID NO: 3470 - RNA, 21 nt, synthetic construct
  source 1..21: mol_type = other RNA
cccagcccctcacccaggcca

SEQ ID NO: 3471 - RNA, 21 nt, synthetic construct
  source 1..21: mol_type = other RNA
cccaggccagccggccagttc

SEQ ID NO: 3472 - RNA, 21 nt, synthetic construct
  source 1..21: mol_type = other RNA
ccccgtcctaacccctgacct

SEQ ID NO: 3473 - RNA, 21 nt, synthetic construct
  source 1..21: mol_type = other RNA
cccctgacctttgtgcccttc

SEQ ID NO: 3474 - RNA, 21 nt, synthetic construct
  source 1..21: mol_type = other RNA
cccgggagcagatgacggcca

SEQ ID NO: 3475 - RNA, 21 nt, synthetic construct
  source 1..21: mol_type = other RNA
cccgggccgcacgaggtaacg

SEQ ID NO: 3476 - RNA, 21 nt, synthetic construct
  source 1..21: mol_type = other RNA
cccgtcctaacccctgacctt

SEQ ID NO: 3477 - RNA, 21 nt, synthetic construct
  source 1..21: mol_type = other RNA
ccctgacctttgtgcccttcc

SEQ ID NO: 3478 - RNA, 21 nt, synthetic construct
  source 1..21: mol_type = other RNA
ccctggtggttggtgtcgtgg

SEQ ID NO: 3479 - RNA, 21 nt, synthetic construct
  source 1..21: mol_type = other RNA
cccttccagagagaagggcag

SEQ ID NO: 3480 - RNA, 21 nt, synthetic construct
  source 1..21: mol_type = other RNA
cccttctctctggaagggcac

SEQ ID NO: 3481 - RNA, 21 nt, synthetic construct
  source 1..21: mol_type = other RNA
ccgaggggctgggatgacgtt

SEQ ID NO: 3482 - RNA, 21 nt, synthetic construct
  source 1..21: mol_type = other RNA
ccgcacgaggtaacgtcatcc

SEQ ID NO: 3483 - RNA, 21 nt, synthetic construct
  source 1..21: mol_type = other RNA
ccgcccacgacaccaaccacc

SEQ ID NO: 3484 - RNA, 21 nt, synthetic construct
  source 1..21: mol_type = other RNA
ccggccagttccaaaccctgg

SEQ ID NO: 3485 - RNA, 21 nt, synthetic construct
  source 1..21: mol_type = other RNA
ccgggagcagatgacggccag

SEQ ID NO: 3486 - RNA, 21 nt, synthetic construct
  source 1..21: mol_type = other RNA
ccgggccgcacgaggtaacgt

SEQ ID NO: 3487 - RNA, 21 nt, synthetic construct
  source 1..21: mol_type = other RNA
ccgtcatctgctcccgggccg

SEQ ID NO: 3488 - RNA, 21 nt, synthetic construct
  source 1..21: mol_type = other RNA
ccgtcctaacccctgaccttt

SEQ ID NO: 3489 - RNA, 21 nt, synthetic construct
  source 1..21: mol_type = other RNA
cctaacccctgacctttgtgc

SEQ ID NO: 3490 - RNA, 21 nt, synthetic construct
  source 1..21: mol_type = other RNA
cctgacctttgtgcccttcca

SEQ ID NO: 3491 - RNA, 21 nt, synthetic construct
  source 1..21: mol_type = other RNA
cctgctgggcagcctggtgct

SEQ ID NO: 3492 - RNA, 21 nt, synthetic construct
  source 1..21: mol_type = other RNA
cctggccgtcatctgctcccg

SEQ ID NO: 3493 - RNA, 21 nt, synthetic construct
  source 1..21: mol_type = other RNA
cctgggtgaggggctggggtg

SEQ ID NO: 3494 - RNA, 21 nt, synthetic construct
  source 1..21: mol_type = other RNA
cctggtgctgctagtctgggt

SEQ ID NO: 3495 - RNA, 21 nt, synthetic construct
  source 1..21: mol_type = other RNA
cctggtggttggtgtcgtggg

SEQ ID NO: 3496 - RNA, 21 nt, synthetic construct
  source 1..21: mol_type = other RNA
ccttccagagagaagggcaga

SEQ ID NO: 3497 - RNA, 21 nt, synthetic construct
  source 1..21: mol_type = other RNA
ccttctctctggaagggcaca

SEQ ID NO: 3498 - RNA, 21 nt, synthetic construct
  source 1..21: mol_type = other RNA
cctttgtgcccttccagagag

SEQ ID NO: 3499 - RNA, 21 nt, synthetic construct
  source 1..21: mol_type = other RNA
cgacaccaaccaccagggttt

SEQ ID NO: 3500 - RNA, 21 nt, synthetic construct
  source 1..21: mol_type = other RNA
cgaggggctgggatgacgtta

SEQ ID NO: 3501 - RNA, 21 nt, synthetic construct
  source 1..21: mol_type = other RNA
cgaggtaacgtcatcccagcc

SEQ ID NO: 3502 - RNA, 21 nt, synthetic construct
  source 1..21: mol_type = other RNA
cgcacgaggtaacgtcatccc

SEQ ID NO: 3503 - RNA, 21 nt, synthetic construct
  source 1..21: mol_type = other RNA
cgcccacgacaccaaccacca

SEQ ID NO: 3504 - RNA, 21 nt, synthetic construct
  source 1..21: mol_type = other RNA
cggccaggacccagactagca

SEQ ID NO: 3505 - RNA, 21 nt, synthetic construct
  source 1..21: mol_type = other RNA
cggccagttccaaaccctggt

SEQ ID NO: 3506 - RNA, 21 nt, synthetic construct
  source 1..21: mol_type = other RNA
cggcccgggagcagatgacgg

SEQ ID NO: 3507 - RNA, 21 nt, synthetic construct
  source 1..21: mol_type = other RNA
cggcctgctgggcagcctggt

SEQ ID NO: 3508 - RNA, 21 nt, synthetic construct
  source 1..21: mol_type = other RNA
cgggagcagatgacggccagg

SEQ ID NO: 3509 - RNA, 21 nt, synthetic construct
  source 1..21: mol_type = other RNA
cgggccgcacgaggtaacgtc

SEQ ID NO: 3510 - RNA, 21 nt, synthetic construct
  source 1..21: mol_type = other RNA
cgtcatcccagcccctcggcc

SEQ ID NO: 3511 - RNA, 21 nt, synthetic construct
  source 1..21: mol_type = other RNA
cgtcatctgctcccgggccgc

SEQ ID NO: 3512 - RNA, 21 nt, synthetic construct
  source 1..21: mol_type = other RNA
cgtcctaacccctgacctttg

SEQ ID NO: 3513 - RNA, 21 nt, synthetic construct
  source 1..21: mol_type = other RNA
cgtgcggcccgggagcagatg

SEQ ID NO: 3514 - RNA, 21 nt, synthetic construct
  source 1..21: mol_type = other RNA
cgttacctcgtgcggcccggg

SEQ ID NO: 3515 - RNA, 21 nt, synthetic construct
  source 1..21: mol_type = other RNA
ctaacccctgacctttgtgcc

SEQ ID NO: 3516 - RNA, 21 nt, synthetic construct
  source 1..21: mol_type = other RNA
ctagcagcaccaggctgccca

SEQ ID NO: 3517 - RNA, 21 nt, synthetic construct
  source 1..21: mol_type = other RNA
ctagtctgggtcctggccgtc

SEQ ID NO: 3518 - RNA, 21 nt, synthetic construct
  source 1..21: mol_type = other RNA
ctcacccaggccagccggcca

SEQ ID NO: 3519 - RNA, 21 nt, synthetic construct
  source 1..21: mol_type = other RNA
ctcccgggccgcacgaggtaa

SEQ ID NO: 3520 - RNA, 21 nt, synthetic construct
  source 1..21: mol_type = other RNA
ctcgtgcggcccgggagcaga

SEQ ID NO: 3521 - RNA, 21 nt, synthetic construct
  source 1..21: mol_type = other RNA
ctctctggaagggcacaaagg

SEQ ID NO: 3522 - RNA, 21 nt, synthetic construct
  source 1..21: mol_type = other RNA
ctctggaagggcacaaaggtc

SEQ ID NO: 3523 - RNA, 21 nt, synthetic construct
  source 1..21: mol_type = other RNA
ctgacctttgtgcccttccag

SEQ ID NO: 3524 - RNA, 21 nt, synthetic construct
  source 1..21: mol_type = other RNA
ctgcccttctctctggaaggg

SEQ ID NO: 3525 - RNA, 21 nt, synthetic construct
  source 1..21: mol_type = other RNA
ctgctagtctgggtcctggcc

SEQ ID NO: 3526 - RNA, 21 nt, synthetic construct
  source 1..21: mol_type = other RNA
ctgctgggcagcctggtgctg

SEQ ID NO: 3527 - RNA, 21 nt, synthetic construct
  source 1..21: mol_type = other RNA
ctggaagggcacaaaggtcag

SEQ ID NO: 3528 - RNA, 21 nt, synthetic construct
  source 1..21: mol_type = other RNA
ctggccggctggcctgggtga

SEQ ID NO: 3529 - RNA, 21 nt, synthetic construct
  source 1..21: mol_type = other RNA
ctggccgtcatctgctcccgg

SEQ ID NO: 3530 - RNA, 21 nt, synthetic construct
  source 1..21: mol_type = other RNA
ctggcctgggtgaggggctgg

SEQ ID NO: 3531 - RNA, 21 nt, synthetic construct
  source 1..21: mol_type = other RNA
ctgggatgacgttacctcgtg

SEQ ID NO: 3532 - RNA, 21 nt, synthetic construct
  source 1..21: mol_type = other RNA
ctgggcagcctggtgctgcta

SEQ ID NO: 3533 - RNA, 21 nt, synthetic construct
  source 1..21: mol_type = other RNA
ctggggtgggctgtgggcact

SEQ ID NO: 3534 - RNA, 21 nt, synthetic construct
  source 1..21: mol_type = other RNA
ctgggtcctggccgtcatctg

SEQ ID NO: 3535 - RNA, 21 nt, synthetic construct
  source 1..21: mol_type = other RNA
ctgggtgaggggctggggtgg

SEQ ID NO: 3536 - RNA, 21 nt, synthetic construct
  source 1..21: mol_type = other RNA
ctggtgctgctagtctgggtc

SEQ ID NO: 3537 - RNA, 21 nt, synthetic construct
  source 1..21: mol_type = other RNA
ctggtggttggtgtcgtgggc

SEQ ID NO: 3538 - RNA, 21 nt, synthetic construct
  source 1..21: mol_type = other RNA
ctgtgggcacttctgcccttc

SEQ ID NO: 3539 - RNA, 21 nt, synthetic construct
  source 1..21: mol_type = other RNA
cttccagagagaagggcagaa

SEQ ID NO: 3540 - RNA, 21 nt, synthetic construct
  source 1..21: mol_type = other RNA
cttctctctggaagggcacaa

SEQ ID NO: 3541 - RNA, 21 nt, synthetic construct
  source 1..21: mol_type = other RNA
cttctgcccttctctctggaa

SEQ ID NO: 3542 - RNA, 21 nt, synthetic construct
  source 1..21: mol_type = other RNA
ctttgtgcccttccagagaga

SEQ ID NO: 3543 - RNA, 21 nt, synthetic construct
  source 1..21: mol_type = other RNA
gaactggccggctggcctggg

SEQ ID NO: 3544 - RNA, 21 nt, synthetic construct
  source 1..21: mol_type = other RNA
gaagggcacaaaggtcagggg

SEQ ID NO: 3545 - RNA, 21 nt, synthetic construct
  source 1..21: mol_type = other RNA
gaagggcagaagtgcccacag

SEQ ID NO: 3546 - RNA, 21 nt, synthetic construct
  source 1..21: mol_type = other RNA
gaagtgcccacagcccacccc

SEQ ID NO: 3547 - RNA, 21 nt, synthetic construct
  source 1..21: mol_type = other RNA
gacaccaaccaccagggtttg

SEQ ID NO: 3548 - RNA, 21 nt, synthetic construct
  source 1..21: mol_type = other RNA
gacccagactagcagcaccag

SEQ ID NO: 3549 - RNA, 21 nt, synthetic construct
  source 1..21: mol_type = other RNA
gaccccgtcctaacccctgac

SEQ ID NO: 3550 - RNA, 21 nt, synthetic construct
  source 1..21: mol_type = other RNA
gacctttgtgcccttccagag

SEQ ID NO: 3551 - RNA, 21 nt, synthetic construct
  source 1..21: mol_type = other RNA
gacggccaggacccagactag

SEQ ID NO: 3552 - RNA, 21 nt, synthetic construct
  source 1..21: mol_type = other RNA
gacgttacctcgtgcggcccg

SEQ ID NO: 3553 - RNA, 21 nt, synthetic construct
  source 1..21: mol_type = other RNA
gactagcagcaccaggctgcc

SEQ ID NO: 3554 - RNA, 21 nt, synthetic construct
  source 1..21: mol_type = other RNA
gagaagggcagaagtgcccac

SEQ ID NO: 3555 - RNA, 21 nt, synthetic construct
  source 1..21: mol_type = other RNA
gagagaagggcagaagtgccc

SEQ ID NO: 3556 - RNA, 21 nt, synthetic construct
  source 1..21: mol_type = other RNA
gagcagatgacggccaggacc

SEQ ID NO: 3557 - RNA, 21 nt, synthetic construct
  source 1..21: mol_type = other RNA
gaggggctgggatgacgttac

SEQ ID NO: 3558 - RNA, 21 nt, synthetic construct
  source 1..21: mol_type = other RNA
gaggggctggggtgggctgtg

SEQ ID NO: 3559 - RNA, 21 nt, synthetic construct
  source 1..21: mol_type = other RNA
gaggtaacgtcatcccagccc

SEQ ID NO: 3560 - RNA, 21 nt, synthetic construct
  source 1..21: mol_type = other RNA
gatgacggccaggacccagac

SEQ ID NO: 3561 - RNA, 21 nt, synthetic construct
  source 1..21: mol_type = other RNA
gatgacgttacctcgtgcggc

SEQ ID NO: 3562 - RNA, 21 nt, synthetic construct
  source 1..21: mol_type = other RNA
gcacaaaggtcaggggttagg

SEQ ID NO: 3563 - RNA, 21 nt, synthetic construct
  source 1..21: mol_type = other RNA
gcaccaggctgcccagcaggc

SEQ ID NO: 3564 - RNA, 21 nt, synthetic construct
  source 1..21: mol_type = other RNA
gcacgaggtaacgtcatccca

SEQ ID NO: 3565 - RNA, 21 nt, synthetic construct
  source 1..21: mol_type = other RNA
gcacttctgcccttctctctg

SEQ ID NO: 3566 - RNA, 21 nt, synthetic construct
  source 1..21: mol_type = other RNA
gcagaagtgcccacagcccac

SEQ ID NO: 3567 - RNA, 21 nt, synthetic construct
  source 1..21: mol_type = other RNA
gcagatgacggccaggaccca

SEQ ID NO: 3568 - RNA, 21 nt, synthetic construct
  source 1..21: mol_type = other RNA
gcagcaccaggctgcccagca

SEQ ID NO: 3569 - RNA, 21 nt, synthetic construct
  source 1..21: mol_type = other RNA
gcagcctggtgctgctagtct

SEQ ID NO: 3570 - RNA, 21 nt, synthetic construct
  source 1..21: mol_type = other RNA
gcaggccgaggggctgggatg

SEQ ID NO: 3571 - RNA, 21 nt, synthetic construct
  source 1..21: mol_type = other RNA
gcaggccgcccacgacaccaa

SEQ ID NO: 3572 - RNA, 21 nt, synthetic construct
  source 1..21: mol_type = other RNA
gccagccggccagttccaaac

SEQ ID NO: 3573 - RNA, 21 nt, synthetic construct
  source 1..21: mol_type = other RNA
gccaggacccagactagcagc

SEQ ID NO: 3574 - RNA, 21 nt, synthetic construct
  source 1..21: mol_type = other RNA
gccagttccaaaccctggtgg

SEQ ID NO: 3575 - RNA, 21 nt, synthetic construct
  source 1..21: mol_type = other RNA
gcccacgacaccaaccaccag

SEQ ID NO: 3576 - RNA, 21 nt, synthetic construct
  source 1..21: mol_type = other RNA
gcccgggagcagatgacggcc

SEQ ID NO: 3577 - RNA, 21 nt, synthetic construct
  source 1..21: mol_type = other RNA
gcccttccagagagaagggca

SEQ ID NO: 3578 - RNA, 21 nt, synthetic construct
  source 1..21: mol_type = other RNA
gcccttctctctggaagggca

SEQ ID NO: 3579 - RNA, 21 nt, synthetic construct
  source 1..21: mol_type = other RNA
gccgaggggctgggatgacgt

SEQ ID NO: 3580 - RNA, 21 nt, synthetic construct
  source 1..21: mol_type = other RNA
gccgcacgaggtaacgtcatc

SEQ ID NO: 3581 - RNA, 21 nt, synthetic construct
  source 1..21: mol_type = other RNA
gccgcccacgacaccaaccac

SEQ ID NO: 3582 - RNA, 21 nt, synthetic construct
  source 1..21: mol_type = other RNA
gccggccagttccaaaccctg

SEQ ID NO: 3583 - RNA, 21 nt, synthetic construct
  source 1..21: mol_type = other RNA
gccgtcatctgctcccgggcc

SEQ ID NO: 3584 - RNA, 21 nt, synthetic construct
  source 1..21: mol_type = other RNA
gcctgctgggcagcctggtgc

SEQ ID NO: 3585 - RNA, 21 nt, synthetic construct
  source 1..21: mol_type = other RNA
gcctgggtgaggggctggggt

SEQ ID NO: 3586 - RNA, 21 nt, synthetic construct
  source 1..21: mol_type = other RNA
gcctggtgctgctagtctggg

SEQ ID NO: 3587 - RNA, 21 nt, synthetic construct
  source 1..21: mol_type = other RNA
gcggcccgggagcagatgacg

SEQ ID NO: 3588 - RNA, 21 nt, synthetic construct
  source 1..21: mol_type = other RNA
gctagtctgggtcctggccgt

SEQ ID NO: 3589 - RNA, 21 nt, synthetic construct
  source 1..21: mol_type = other RNA
gctcccgggccgcacgaggta

SEQ ID NO: 3590 - RNA, 21 nt, synthetic construct
  source 1..21: mol_type = other RNA
gctgctagtctgggtcctggc

SEQ ID NO: 3591 - RNA, 21 nt, synthetic construct
  source 1..21: mol_type = other RNA
gctggcctgggtgaggggctg

SEQ ID NO: 3592 - RNA, 21 nt, synthetic construct
  source 1..21: mol_type = other RNA
gctgggatgacgttacctcgt

SEQ ID NO: 3593 - RNA, 21 nt, synthetic construct
  source 1..21: mol_type = other RNA
gctgggcagcctggtgctgct

SEQ ID NO: 3594 - RNA, 21 nt, synthetic construct
  source 1..21: mol_type = other RNA
gctggggtgggctgtgggcac

SEQ ID NO: 3595 - RNA, 21 nt, synthetic construct
  source 1..21: mol_type = other RNA
gctgtgggcacttctgccctt

SEQ ID NO: 3596 - RNA, 21 nt, synthetic construct
  source 1..21: mol_type = other RNA
ggaactggccggctggcctgg

SEQ ID NO: 3597 - RNA, 21 nt, synthetic construct
  source 1..21: mol_type = other RNA
ggaagggcacaaaggtcaggg

SEQ ID NO: 3598 - RNA, 21 nt, synthetic construct
  source 1..21: mol_type = other RNA
ggacccagactagcagcacca

SEQ ID NO: 3599 - RNA, 21 nt, synthetic construct
  source 1..21: mol_type = other RNA
ggagcagatgacggccaggac

SEQ ID NO: 3600 - RNA, 21 nt, synthetic construct
  source 1..21: mol_type = other RNA
ggatgacgttacctcgtgcgg

SEQ ID NO: 3601 - RNA, 21 nt, synthetic construct
  source 1..21: mol_type = other RNA
ggcacaaaggtcaggggttag

SEQ ID NO: 3602 - RNA, 21 nt, synthetic construct
  source 1..21: mol_type = other RNA
ggcacttctgcccttctctct

SEQ ID NO: 3603 - RNA, 21 nt, synthetic construct
  source 1..21: mol_type = other RNA
ggcagaagtgcccacagccca

SEQ ID NO: 3604 - RNA, 21 nt, synthetic construct
  source 1..21: mol_type = other RNA
ggcagcctggtgctgctagtc

SEQ ID NO: 3605 - RNA, 21 nt, synthetic construct
  source 1..21: mol_type = other RNA
ggcaggccgaggggctgggat

SEQ ID NO: 3606 - RNA, 21 nt, synthetic construct
  source 1..21: mol_type = other RNA
ggccagccggccagttccaaa

SEQ ID NO: 3607 - RNA, 21 nt, synthetic construct
  source 1..21: mol_type = other RNA
ggccaggacccagactagcag

SEQ ID NO: 3608 - RNA, 21 nt, synthetic construct
  source 1..21: mol_type = other RNA
ggccagttccaaaccctggtg

SEQ ID NO: 3609 - RNA, 21 nt, synthetic construct
  source 1..21: mol_type = other RNA
ggcccgggagcagatgacggc

SEQ ID NO: 3610 - RNA, 21 nt, synthetic construct
  source 1..21: mol_type = other RNA
ggccgaggggctgggatgacg

SEQ ID NO: 3611 - RNA, 21 nt, synthetic construct
  source 1..21: mol_type = other RNA
ggccgcacgaggtaacgtcat

SEQ ID NO: 3612 - RNA, 21 nt, synthetic construct
  source 1..21: mol_type = other RNA
ggccgcccacgacaccaacca

SEQ ID NO: 3613 - RNA, 21 nt, synthetic construct
  source 1..21: mol_type = other RNA
ggccgtcatctgctcccgggc

SEQ ID NO: 3614 - RNA, 21 nt, synthetic construct
  source 1..21: mol_type = other RNA
ggcctgctgggcagcctggtg

SEQ ID NO: 3615 - RNA, 21 nt, synthetic construct
  source 1..21: mol_type = other RNA
ggctggcctgggtgaggggct

SEQ ID NO: 3616 - RNA, 21 nt, synthetic construct
  source 1..21: mol_type = other RNA
ggctgggatgacgttacctcg

SEQ ID NO: 3617 - RNA, 21 nt, synthetic construct
  source 1..21: mol_type = other RNA
ggctggggtgggctgtgggca

SEQ ID NO: 3618 - RNA, 21 nt, synthetic construct
  source 1..21: mol_type = other RNA
ggctgtgggcacttctgccct

SEQ ID NO: 3619 - RNA, 21 nt, synthetic construct
  source 1..21: mol_type = other RNA
gggagcagatgacggccagga

SEQ ID NO: 3620 - RNA, 21 nt, synthetic construct
  source 1..21: mol_type = other RNA
gggatgacgttacctcgtgcg

SEQ ID NO: 3621 - RNA, 21 nt, synthetic construct
  source 1..21: mol_type = other RNA
gggcacaaaggtcaggggtta

SEQ ID NO: 3622 - RNA, 21 nt, synthetic construct
  source 1..21: mol_type = other RNA
gggcacttctgcccttctctc

SEQ ID NO: 3623 - RNA, 21 nt, synthetic construct
  source 1..21: mol_type = other RNA
gggcagaagtgcccacagccc

SEQ ID NO: 3624 - RNA, 21 nt, synthetic construct
  source 1..21: mol_type = other RNA
gggcagcctggtgctgctagt

SEQ ID NO: 3625 - RNA, 21 nt, synthetic construct
  source 1..21: mol_type = other RNA
gggccgcacgaggtaacgtca

SEQ ID NO: 3626 - RNA, 21 nt, synthetic construct
  source 1..21: mol_type = other RNA
gggctgggatgacgttacctc

SEQ ID NO: 3627 - RNA, 21 nt, synthetic construct
  source 1..21: mol_type = other RNA
gggctgtgggcacttctgccc

SEQ ID NO: 3628 - RNA, 21 nt, synthetic construct
  source 1..21: mol_type = other RNA
ggggctgggatgacgttacct

SEQ ID NO: 3629 - RNA, 21 nt, synthetic construct
  source 1..21: mol_type = other RNA
ggggtgggctgtgggcacttc

SEQ ID NO: 3630 - RNA, 21 nt, synthetic construct
  source 1..21: mol_type = other RNA
gggtcctggccgtcatctgct

SEQ ID NO: 3631 - RNA, 21 nt, synthetic construct
  source 1..21: mol_type = other RNA
gggtgggctgtgggcacttct

SEQ ID NO: 3632 - RNA, 21 nt, synthetic construct
  source 1..21: mol_type = other RNA
gggtttggaactggccggctg

SEQ ID NO: 3633 - RNA, 21 nt, synthetic construct
  source 1..21: mol_type = other RNA
ggtaacgtcatcccagcccct

SEQ ID NO: 3634 - RNA, 21 nt, synthetic construct
  source 1..21: mol_type = other RNA
ggtcctggccgtcatctgctc

SEQ ID NO: 3635 - RNA, 21 nt, synthetic construct
  source 1..21: mol_type = other RNA
ggtgaggggctggggtgggct

SEQ ID NO: 3636 - RNA, 21 nt, synthetic construct
  source 1..21: mol_type = other RNA
ggtgctgctagtctgggtcct

SEQ ID NO: 3637 - RNA, 21 nt, synthetic construct
  source 1..21: mol_type = other RNA
ggtgggctgtgggcacttctg

SEQ ID NO: 3638 - RNA, 21 nt, synthetic construct
  source 1..21: mol_type = other RNA
ggtggttggtgtcgtgggcgg

SEQ ID NO: 3639 - RNA, 21 nt, synthetic construct
  source 1..21: mol_type = other RNA
ggtgtcgtgggcggcctgctg

SEQ ID NO: 3640 - RNA, 21 nt, synthetic construct
  source 1..21: mol_type = other RNA
ggttggtgtcgtgggcggcct

SEQ ID NO: 3641 - RNA, 21 nt, synthetic construct
  source 1..21: mol_type = other RNA
ggtttggaactggccggctgg

SEQ ID NO: 3642 - RNA, 21 nt, synthetic construct
  source 1..21: mol_type = other RNA
gtaacgtcatcccagcccctc

SEQ ID NO: 3643 - RNA, 21 nt, synthetic construct
  source 1..21: mol_type = other RNA
gtcatcccagcccctcggcct

SEQ ID NO: 3644 - RNA, 21 nt, synthetic construct
  source 1..21: mol_type = other RNA
gtcatctgctcccgggccgca

SEQ ID NO: 3645 - RNA, 21 nt, synthetic construct
  source 1..21: mol_type = other RNA
gtcctaacccctgacctttgt

SEQ ID NO: 3646 - RNA, 21 nt, synthetic construct
  source 1..21: mol_type = other RNA
gtcctggccgtcatctgctcc

SEQ ID NO: 3647 - RNA, 21 nt, synthetic construct
  source 1..21: mol_type = other RNA
gtctgggtcctggccgtcatc

SEQ ID NO: 3648 - RNA, 21 nt, synthetic construct
  source 1..21: mol_type = other RNA
gtgaggggctggggtgggctg

SEQ ID NO: 3649 - RNA, 21 nt, synthetic construct
  source 1..21: mol_type = other RNA
gtgcccacagcccaccccagc

SEQ ID NO: 3650 - RNA, 21 nt, synthetic construct
  source 1..21: mol_type = other RNA
gtgcccttccagagagaaggg

SEQ ID NO: 3651 - RNA, 21 nt, synthetic construct
  source 1..21: mol_type = other RNA
gtgcggcccgggagcagatga

SEQ ID NO: 3652 - RNA, 21 nt, synthetic construct
  source 1..21: mol_type = other RNA
gtgctgctagtctgggtcctg

SEQ ID NO: 3653 - RNA, 21 nt, synthetic construct
  source 1..21: mol_type = other RNA
gtgggcacttctgcccttctc

SEQ ID NO: 3654 - RNA, 21 nt, synthetic construct
  source 1..21: mol_type = other RNA
gtgggctgtgggcacttctgc

SEQ ID NO: 3655 - RNA, 21 nt, synthetic construct
  source 1..21: mol_type = other RNA
gtggttggtgtcgtgggcggc

SEQ ID NO: 3656 - RNA, 21 nt, synthetic construct
  source 1..21: mol_type = other RNA
gtgtcgtgggcggcctgctgg

SEQ ID NO: 3657 - RNA, 21 nt, synthetic construct
  source 1..21: mol_type = other RNA
gttacctcgtgcggcccggga

SEQ ID NO: 3658 - RNA, 21 nt, synthetic construct
  source 1..21: mol_type = other RNA
gttagggcagggcaggccgag

SEQ ID NO: 3659 - RNA, 21 nt, synthetic construct
  source 1..21: mol_type = other RNA
gttccaaaccctggtggttgg

SEQ ID NO: 3660 - RNA, 21 nt, synthetic construct
  source 1..21: mol_type = other RNA
gttggtgtcgtgggcggcctg

SEQ ID NO: 3661 - RNA, 21 nt, synthetic construct
  source 1..21: mol_type = other RNA
gtttggaactggccggctggc

SEQ ID NO: 3662 - RNA, 21 nt, synthetic construct
  source 1..21: mol_type = other RNA
taacccctgacctttgtgccc

SEQ ID NO: 3663 - RNA, 21 nt, synthetic construct
  source 1..21: mol_type = other RNA
taacgtcatcccagcccctcg

SEQ ID NO: 3664 - RNA, 21 nt, synthetic construct
  source 1..21: mol_type = other RNA
tacctcgtgcggcccgggagc

SEQ ID NO: 3665 - RNA, 21 nt, synthetic construct
  source 1..21: mol_type = other RNA
tagcagcaccaggctgcccag

SEQ ID NO: 3666 - RNA, 21 nt, synthetic construct
  source 1..21: mol_type = other RNA
tagggcagggcaggccgaggg

SEQ ID NO: 3667 - RNA, 21 nt, synthetic construct
  source 1..21: mol_type = other RNA
tagtctgggtcctggccgtca

SEQ ID NO: 3668 - RNA, 21 nt, synthetic construct
  source 1..21: mol_type = other RNA
tcacccaggccagccggccag

SEQ ID NO: 3669 - RNA, 21 nt, synthetic construct
  source 1..21: mol_type = other RNA
tcatcccagcccctcggcctg

SEQ ID NO: 3670 - RNA, 21 nt, synthetic construct
  source 1..21: mol_type = other RNA
tcatctgctcccgggccgcac

SEQ ID NO: 3671 - RNA, 21 nt, synthetic construct
  source 1..21: mol_type = other RNA
tccaaaccctggtggttggtg

SEQ ID NO: 3672 - RNA, 21 nt, synthetic construct
  source 1..21: mol_type = other RNA
tccagagagaagggcagaagt

SEQ ID NO: 3673 - RNA, 21 nt, synthetic construct
  source 1..21: mol_type = other RNA
tcccgggccgcacgaggtaac

SEQ ID NO: 3674 - RNA, 21 nt, synthetic construct
  source 1..21: mol_type = other RNA
tcctaacccctgacctttgtg

SEQ ID NO: 3675 - RNA, 21 nt, synthetic construct
  source 1..21: mol_type = other RNA
tcctggccgtcatctgctccc

SEQ ID NO: 3676 - RNA, 21 nt, synthetic construct
  source 1..21: mol_type = other RNA
tcgtgcggcccgggagcagat

SEQ ID NO: 3677 - RNA, 21 nt, synthetic construct
  source 1..21: mol_type = other RNA
tcgtgggcggcctgctgggca

SEQ ID NO: 3678 - RNA, 21 nt, synthetic construct
  source 1..21: mol_type = other RNA
tctctctggaagggcacaaag

SEQ ID NO: 3679 - RNA, 21 nt, synthetic construct
  source 1..21: mol_type = other RNA
tctctggaagggcacaaaggt

SEQ ID NO: 3680 - RNA, 21 nt, synthetic construct
  source 1..21: mol_type = other RNA
tctgcccttctctctggaagg

SEQ ID NO: 3681 - RNA, 21 nt, synthetic construct
  source 1..21: mol_type = other RNA
tctgctcccgggccgcacgag

SEQ ID NO: 3682 - RNA, 21 nt, synthetic construct
  source 1..21: mol_type = other RNA
tctggaagggcacaaaggtca

SEQ ID NO: 3683 - RNA, 21 nt, synthetic construct
  source 1..21: mol_type = other RNA
tctgggtcctggccgtcatct

SEQ ID NO: 3684 - RNA, 21 nt, synthetic construct
  source 1..21: mol_type = other RNA
tgaccccgtcctaacccctga

SEQ ID NO: 3685 - RNA, 21 nt, synthetic construct
  source 1..21: mol_type = other RNA
tgacctttgtgcccttccaga

SEQ ID NO: 3686 - RNA, 21 nt, synthetic construct
  source 1..21: mol_type = other RNA
tgacggccaggacccagacta

SEQ ID NO: 3687 - RNA, 21 nt, synthetic construct
  source 1..21: mol_type = other RNA
tgacgttacctcgtgcggccc

SEQ ID NO: 3688 - RNA, 21 nt, synthetic construct
  source 1..21: mol_type = other RNA
tgaggggctggggtgggctgt

SEQ ID NO: 3689 - RNA, 21 nt, synthetic construct
  source 1..21: mol_type = other RNA
tgcccacagcccaccccagcc

SEQ ID NO: 3690 - RNA, 21 nt, synthetic construct
  source 1..21: mol_type = other RNA
tgcccagcaggccgcccacga

SEQ ID NO: 3691 - RNA, 21 nt, synthetic construct
  source 1..21: mol_type = other RNA
tgcccttccagagagaagggc

SEQ ID NO: 3692 - RNA, 21 nt, synthetic construct
  source 1..21: mol_type = other RNA
tgcccttctctctggaagggc

SEQ ID NO: 3693 - RNA, 21 nt, synthetic construct
  source 1..21: mol_type = other RNA
tgcggcccgggagcagatgac

SEQ ID NO: 3694 - RNA, 21 nt, synthetic construct
  source 1..21: mol_type = other RNA
tgctagtctgggtcctggccg

SEQ ID NO: 3695 - RNA, 21 nt, synthetic construct
  source 1..21: mol_type = other RNA
tgctcccgggccgcacgaggt

SEQ ID NO: 3696 - RNA, 21 nt, synthetic construct
  source 1..21: mol_type = other RNA
tgctgctagtctgggtcctgg

SEQ ID NO: 3697 - RNA, 21 nt, synthetic construct
  source 1..21: mol_type = other RNA
tgctgggcagcctggtgctgc

SEQ ID NO: 3698 - RNA, 21 nt, synthetic construct
  source 1..21: mol_type = other RNA
tggaactggccggctggcctg

SEQ ID NO: 3699 - RNA, 21 nt, synthetic construct
  source 1..21: mol_type = other RNA
tggaagggcacaaaggtcagg

SEQ ID NO: 3700 - RNA, 21 nt, synthetic construct
  source 1..21: mol_type = other RNA
tggccggctggcctgggtgag

SEQ ID NO: 3701 - RNA, 21 nt, synthetic construct
  source 1..21: mol_type = other RNA
tggccgtcatctgctcccggg

SEQ ID NO: 3702 - RNA, 21 nt, synthetic construct
  source 1..21: mol_type = other RNA
tggcctgggtgaggggctggg

SEQ ID NO: 3703 - RNA, 21 nt, synthetic construct
  source 1..21: mol_type = other RNA
tgggatgacgttacctcgtgc

SEQ ID NO: 3704 - RNA, 21 nt, synthetic construct
  source 1..21: mol_type = other RNA
tgggcacttctgcccttctct

SEQ ID NO: 3705 - RNA, 21 nt, synthetic construct
  source 1..21: mol_type = other RNA
tgggcagcctggtgctgctag

SEQ ID NO: 3706 - RNA, 21 nt, synthetic construct
  source 1..21: mol_type = other RNA
tgggctgtgggcacttctgcc

SEQ ID NO: 3707 - RNA, 21 nt, synthetic construct
  source 1..21: mol_type = other RNA
tggggtgggctgtgggcactt

SEQ ID NO: 3708 - RNA, 21 nt, synthetic construct
  source 1..21: mol_type = other RNA
tgggtcctggccgtcatctgc

SEQ ID NO: 3709 - RNA, 21 nt, synthetic construct
  source 1..21: mol_type = other RNA
tgggtgaggggctggggtggg

SEQ ID NO: 3710 - RNA, 21 nt, synthetic construct
  source 1..21: mol_type = other RNA
tggtgctgctagtctgggtcc

SEQ ID NO: 3711 - RNA, 21 nt, synthetic construct
  source 1..21: mol_type = other RNA
tggtggttggtgtcgtgggcg

SEQ ID NO: 3712 - RNA, 21 nt, synthetic construct
  source 1..21: mol_type = other RNA
tggtgtcgtgggcggcctgct

SEQ ID NO: 3713 - RNA, 21 nt, synthetic construct
  source 1..21: mol_type = other RNA
tggttggtgtcgtgggcggcc

SEQ ID NO: 3714 - RNA, 21 nt, synthetic construct
  source 1..21: mol_type = other RNA
tgtcgtgggcggcctgctggg

SEQ ID NO: 3715 - RNA, 21 nt, synthetic construct
  source 1..21: mol_type = other RNA
tgtgcccttccagagagaagg

SEQ ID NO: 3716 - RNA, 21 nt, synthetic construct
  source 1..21: mol_type = other RNA
tgtgggcacttctgcccttct

SEQ ID NO: 3717 - RNA, 21 nt, synthetic construct
  source 1..21: mol_type = other RNA
ttacctcgtgcggcccgggag

SEQ ID NO: 3718 - RNA, 21 nt, synthetic construct
  source 1..21: mol_type = other RNA
ttagggcagggcaggccgagg

SEQ ID NO: 3719 - RNA, 21 nt, synthetic construct
  source 1..21: mol_type = other RNA
ttccaaaccctggtggttggt

SEQ ID NO: 3720 - RNA, 21 nt, synthetic construct
  source 1..21: mol_type = other RNA
ttccagagagaagggcagaag

SEQ ID NO: 3721 - RNA, 21 nt, synthetic construct
  source 1..21: mol_type = other RNA
ttctctctggaagggcacaaa

SEQ ID NO: 3722 - RNA, 21 nt, synthetic construct
  source 1..21: mol_type = other RNA
ttctgcccttctctctggaag

SEQ ID NO: 3723 - RNA, 21 nt, synthetic construct
  source 1..21: mol_type = other RNA
ttggaactggccggctggcct

SEQ ID NO: 3724 - RNA, 21 nt, synthetic construct
  source 1..21: mol_type = other RNA
ttggtgtcgtgggcggcctgc

SEQ ID NO: 3725 - RNA, 21 nt, synthetic construct
  source 1..21: mol_type = other RNA
ttgtgcccttccagagagaag

SEQ ID NO: 3726 - RNA, 21 nt, synthetic construct
  source 1..21: mol_type = other RNA
tttggaactggccggctggcc

SEQ ID NO: 3727 - RNA, 21 nt, synthetic construct
  source 1..21: mol_type = other RNA
tttgtgcccttccagagagaa

SEQ ID NO: 3728 - RNA, 22 nt, synthetic construct
  source 1..22: mol_type = other RNA
aaaccctggtggttggtgtcgt

SEQ ID NO: 3729 - RNA, 22 nt, synthetic construct
  source 1..22: mol_type = other RNA
aaccaccagggtttggaactgg

SEQ ID NO: 3730 - RNA, 22 nt, synthetic construct
  source 1..22: mol_type = other RNA
aacccctgacctttgtgccctt

SEQ ID NO: 3731 - RNA, 22 nt, synthetic construct
  source 1..22: mol_type = other RNA
aaccctggtggttggtgtcgtg

SEQ ID NO: 3732 - RNA, 22 nt, synthetic construct
  source 1..22: mol_type = other RNA
aacgtcatcccagcccctcggc

SEQ ID NO: 3733 - RNA, 22 nt, synthetic construct
  source 1..22: mol_type = other RNA
aactggccggctggcctgggtg

SEQ ID NO: 3734 - RNA, 22 nt, synthetic construct
  source 1..22: mol_type = other RNA
aagggcacaaaggtcaggggtt

SEQ ID NO: 3735 - RNA, 22 nt, synthetic construct
  source 1..22: mol_type = other RNA
aagggcagaagtgcccacagcc

SEQ ID NO: 3736 - RNA, 22 nt, synthetic construct
  source 1..22: mol_type = other RNA
aagtgcccacagcccaccccag

SEQ ID NO: 3737 - RNA, 22 nt, synthetic construct
  source 1..22: mol_type = other RNA
acaccaaccaccagggtttgga

SEQ ID NO: 3738 - RNA, 22 nt, synthetic construct
  source 1..22: mol_type = other RNA
acagcccaccccagcccctcac

SEQ ID NO: 3739 - RNA, 22 nt, synthetic construct
  source 1..22: mol_type = other RNA
accaaccaccagggtttggaac

SEQ ID NO: 3740 - RNA, 22 nt, synthetic construct
  source 1..22: mol_type = other RNA
accaccagggtttggaactggc

SEQ ID NO: 3741 - RNA, 22 nt, synthetic construct
  source 1..22: mol_type = other RNA
accaggctgcccagcaggccgc

SEQ ID NO: 3742 - RNA, 22 nt, synthetic construct
  source 1..22: mol_type = other RNA
accagggtttggaactggccgg

SEQ ID NO: 3743 - RNA, 22 nt, synthetic construct
  source 1..22: mol_type = other RNA
acccagactagcagcaccaggc

SEQ ID NO: 3744 - RNA, 22 nt, synthetic construct
  source 1..22: mol_type = other RNA
acccaggccagccggccagttc

SEQ ID NO: 3745 - RNA, 22 nt, synthetic construct
  source 1..22: mol_type = other RNA
accccagcccctcacccaggcc

SEQ ID NO: 3746 - RNA, 22 nt, synthetic construct
  source 1..22: mol_type = other RNA
accccgtcctaacccctgacct

SEQ ID NO: 3747 - RNA, 22 nt, synthetic construct
  source 1..22: mol_type = other RNA
acccctgacctttgtgcccttc

SEQ ID NO: 3748 - RNA, 22 nt, synthetic construct
  source 1..22: mol_type = other RNA
accctggtggttggtgtcgtgg

SEQ ID NO: 3749 - RNA, 22 nt, synthetic construct
  source 1..22: mol_type = other RNA
acctcgtgcggcccgggagcag

SEQ ID NO: 3750 - RNA, 22 nt, synthetic construct
  source 1..22: mol_type = other RNA
acctttgtgcccttccagagag

SEQ ID NO: 3751 - RNA, 22 nt, synthetic construct
  source 1..22: mol_type = other RNA
acgacaccaaccaccagggttt

SEQ ID NO: 3752 - RNA, 22 nt, synthetic construct
  source 1..22: mol_type = other RNA
acgaggtaacgtcatcccagcc

SEQ ID NO: 3753 - RNA, 22 nt, synthetic construct
  source 1..22: mol_type = other RNA
acggccaggacccagactagca

SEQ ID NO: 3754 - RNA, 22 nt, synthetic construct
  source 1..22: mol_type = other RNA
acgtcatcccagcccctcggcc

SEQ ID NO: 3755 - RNA, 22 nt, synthetic construct
  source 1..22: mol_type = other RNA
acgttacctcgtgcggcccggg

SEQ ID NO: 3756 - RNA, 22 nt, synthetic construct
  source 1..22: mol_type = other RNA
actagcagcaccaggctgccca

SEQ ID NO: 3757 - RNA, 22 nt, synthetic construct
  source 1..22: mol_type = other RNA
actggccggctggcctgggtga

SEQ ID NO: 3758 - RNA, 22 nt, synthetic construct
  source 1..22: mol_type = other RNA
acttctgcccttctctctggaa

SEQ ID NO: 3759 - RNA, 22 nt, synthetic construct
  source 1..22: mol_type = other RNA
agaagggcagaagtgcccacag

SEQ ID NO: 3760 - RNA, 22 nt, synthetic construct
  source 1..22: mol_type = other RNA
agaagtgcccacagcccacccc

SEQ ID NO: 3761 - RNA, 22 nt, synthetic construct
  source 1..22: mol_type = other RNA
agactagcagcaccaggctgcc

SEQ ID NO: 3762 - RNA, 22 nt, synthetic construct
  source 1..22: mol_type = other RNA
agagaagggcagaagtgcccac

SEQ ID NO: 3763 - RNA, 22 nt, synthetic construct
  source 1..22: mol_type = other RNA
agagagaagggcagaagtgccc

SEQ ID NO: 3764 - RNA, 22 nt, synthetic construct
  source 1..22: mol_type = other RNA
agatgacggccaggacccagac

SEQ ID NO: 3765 - RNA, 22 nt, synthetic construct
  source 1..22: mol_type = other RNA
agcaccaggctgcccagcaggc

SEQ ID NO: 3766 - RNA, 22 nt, synthetic construct
  source 1..22: mol_type = other RNA
agcagatgacggccaggaccca

SEQ ID NO: 3767 - RNA, 22 nt, synthetic construct
  source 1..22: mol_type = other RNA
agcagcaccaggctgcccagca

SEQ ID NO: 3768 - RNA, 22 nt, synthetic construct
  source 1..22: mol_type = other RNA
agcaggccgcccacgacaccaa

SEQ ID NO: 3769 - RNA, 22 nt, synthetic construct
  source 1..22: mol_type = other RNA
agcccaccccagcccctcaccc

SEQ ID NO: 3770 - RNA, 22 nt, synthetic construct
  source 1..22: mol_type = other RNA
agcccctcacccaggccagccg

SEQ ID NO: 3771 - RNA, 22 nt, synthetic construct
  source 1..22: mol_type = other RNA
agccggccagttccaaaccctg

SEQ ID NO: 3772 - RNA, 22 nt, synthetic construct
  source 1..22: mol_type = other RNA
agcctggtgctgctagtctggg

SEQ ID NO: 3773 - RNA, 22 nt, synthetic construct
  source 1..22: mol_type = other RNA
aggacccagactagcagcacca

SEQ ID NO: 3774 - RNA, 22 nt, synthetic construct
  source 1..22: mol_type = other RNA
aggccagccggccagttccaaa

SEQ ID NO: 3775 - RNA, 22 nt, synthetic construct
  source 1..22: mol_type = other RNA
aggccgaggggctgggatgacg

SEQ ID NO: 3776 - RNA, 22 nt, synthetic construct
  source 1..22: mol_type = other RNA
aggccgcccacgacaccaacca

SEQ ID NO: 3777 - RNA, 22 nt, synthetic construct
  source 1..22: mol_type = other RNA
aggctgcccagcaggccgccca

SEQ ID NO: 3778 - RNA, 22 nt, synthetic construct
  source 1..22: mol_type = other RNA
agggcacaaaggtcaggggtta

SEQ ID NO: 3779 - RNA, 22 nt, synthetic construct
  source 1..22: mol_type = other RNA
agggcagaagtgcccacagccc

SEQ ID NO: 3780 - RNA, 22 nt, synthetic construct
  source 1..22: mol_type = other RNA
agggcaggccgaggggctggga

SEQ ID NO: 3781 - RNA, 22 nt, synthetic construct
  source 1..22: mol_type = other RNA
aggggctgggatgacgttacct

SEQ ID NO: 3782 - RNA, 22 nt, synthetic construct
  source 1..22: mol_type = other RNA
aggggctggggtgggctgtggg

SEQ ID NO: 3783 - RNA, 22 nt, synthetic construct
  source 1..22: mol_type = other RNA
agggtttggaactggccggctg

SEQ ID NO: 3784 - RNA, 22 nt, synthetic construct
  source 1..22: mol_type = other RNA
aggtaacgtcatcccagcccct

SEQ ID NO: 3785 - RNA, 22 nt, synthetic construct
  source 1..22: mol_type = other RNA
agtctgggtcctggccgtcatc

SEQ ID NO: 3786 - RNA, 22 nt, synthetic construct
  source 1..22: mol_type = other RNA
agtgcccacagcccaccccagc

SEQ ID NO: 3787 - RNA, 22 nt, synthetic construct
  source 1..22: mol_type = other RNA
agttccaaaccctggtggttgg

SEQ ID NO: 3788 - RNA, 22 nt, synthetic construct
  source 1..22: mol_type = other RNA
atcccagcccctcggcctgccc

SEQ ID NO: 3789 - RNA, 22 nt, synthetic construct
  source 1..22: mol_type = other RNA
atctgctcccgggccgcacgag

SEQ ID NO: 3790 - RNA, 22 nt, synthetic construct
  source 1..22: mol_type = other RNA
atgacggccaggacccagacta

SEQ ID NO: 3791 - RNA, 22 nt, synthetic construct
  source 1..22: mol_type = other RNA
atgacgttacctcgtgcggccc

SEQ ID NO: 3792 - RNA, 22 nt, synthetic construct
  source 1..22: mol_type = other RNA
caaaccctggtggttggtgtcg

SEQ ID NO: 3793 - RNA, 22 nt, synthetic construct
  source 1..22: mol_type = other RNA
caaccaccagggtttggaactg

SEQ ID NO: 3794 - RNA, 22 nt, synthetic construct
  source 1..22: mol_type = other RNA
cacagcccaccccagcccctca

SEQ ID NO: 3795 - RNA, 22 nt, synthetic construct
  source 1..22: mol_type = other RNA
caccaaccaccagggtttggaa

SEQ ID NO: 3796 - RNA, 22 nt, synthetic construct
  source 1..22: mol_type = other RNA
caccaggctgcccagcaggccg

SEQ ID NO: 3797 - RNA, 22 nt, synthetic construct
  source 1..22: mol_type = other RNA
caccagggtttggaactggccg

SEQ ID NO: 3798 - RNA, 22 nt, synthetic construct
  source 1..22: mol_type = other RNA
cacccaggccagccggccagtt

SEQ ID NO: 3799 - RNA, 22 nt, synthetic construct
  source 1..22: mol_type = other RNA
caccccagcccctcacccaggc

SEQ ID NO: 3800 - RNA, 22 nt, synthetic construct
  source 1..22: mol_type = other RNA
cacgacaccaaccaccagggtt

SEQ ID NO: 3801 - RNA, 22 nt, synthetic construct
  source 1..22: mol_type = other RNA
cacgaggtaacgtcatcccagc

SEQ ID NO: 3802 - RNA, 22 nt, synthetic construct
  source 1..22: mol_type = other RNA
cacttctgcccttctctctgga

SEQ ID NO: 3803 - RNA, 22 nt, synthetic construct
  source 1..22: mol_type = other RNA
cagaagtgcccacagcccaccc

SEQ ID NO: 3804 - RNA, 22 nt, synthetic construct
  source 1..22: mol_type = other RNA
cagactagcagcaccaggctgc

SEQ ID NO: 3805 - RNA, 22 nt, synthetic construct
  source 1..22: mol_type = other RNA
cagagagaagggcagaagtgcc

SEQ ID NO: 3806 - RNA, 22 nt, synthetic construct
  source 1..22: mol_type = other RNA
cagatgacggccaggacccaga

SEQ ID NO: 3807 - RNA, 22 nt, synthetic construct
  source 1..22: mol_type = other RNA
cagcaccaggctgcccagcagg

SEQ ID NO: 3808 - RNA, 22 nt, synthetic construct
  source 1..22: mol_type = other RNA
cagcaggccgcccacgacacca

SEQ ID NO: 3809 - RNA, 22 nt, synthetic construct
  source 1..22: mol_type = other RNA
cagcccaccccagcccctcacc

SEQ ID NO: 3810 - RNA, 22 nt, synthetic construct
  source 1..22: mol_type = other RNA
cagcccctcacccaggccagcc

SEQ ID NO: 3811 - RNA, 22 nt, synthetic construct
  source 1..22: mol_type = other RNA
cagccggccagttccaaaccct

SEQ ID NO: 3812 - RNA, 22 nt, synthetic construct
  source 1..22: mol_type = other RNA
cagcctggtgctgctagtctgg

SEQ ID NO: 3813 - RNA, 22 nt, synthetic construct
  source 1..22: mol_type = other RNA
caggacccagactagcagcacc

SEQ ID NO: 3814 - RNA, 22 nt, synthetic construct
  source 1..22: mol_type = other RNA
caggccagccggccagttccaa

SEQ ID NO: 3815 - RNA, 22 nt, synthetic construct
  source 1..22: mol_type = other RNA
caggccgaggggctgggatgac

SEQ ID NO: 3816 - RNA, 22 nt, synthetic construct
  source 1..22: mol_type = other RNA
caggccgcccacgacaccaacc

SEQ ID NO: 3817 - RNA, 22 nt, synthetic construct
  source 1..22: mol_type = other RNA
cagggtttggaactggccggct

SEQ ID NO: 3818 - RNA, 22 nt, synthetic construct
  source 1..22: mol_type = other RNA
cagttccaaaccctggtggttg

SEQ ID NO: 3819 - RNA, 22 nt, synthetic construct
  source 1..22: mol_type = other RNA
catcccagcccctcggcctgcc

SEQ ID NO: 3820 - RNA, 22 nt, synthetic construct
  source 1..22: mol_type = other RNA
catctgctcccgggccgcacga

SEQ ID NO: 3821 - RNA, 22 nt, synthetic construct
  source 1..22: mol_type = other RNA
ccaaaccctggtggttggtgtc

SEQ ID NO: 3822 - RNA, 22 nt, synthetic construct
  source 1..22: mol_type = other RNA
ccaaccaccagggtttggaact

SEQ ID NO: 3823 - RNA, 22 nt, synthetic construct
  source 1..22: mol_type = other RNA
ccacagcccaccccagcccctc

SEQ ID NO: 3824 - RNA, 22 nt, synthetic construct
  source 1..22: mol_type = other RNA
ccaccagggtttggaactggcc

SEQ ID NO: 3825 - RNA, 22 nt, synthetic construct
  source 1..22: mol_type = other RNA
ccaccccagcccctcacccagg

SEQ ID NO: 3826 - RNA, 22 nt, synthetic construct
  source 1..22: mol_type = other RNA
ccacgacaccaaccaccagggt

SEQ ID NO: 3827 - RNA, 22 nt, synthetic construct
  source 1..22: mol_type = other RNA
ccagactagcagcaccaggctg

SEQ ID NO: 3828 - RNA, 22 nt, synthetic construct
  source 1..22: mol_type = other RNA
ccagagagaagggcagaagtgc

SEQ ID NO: 3829 - RNA, 22 nt, synthetic construct
  source 1..22: mol_type = other RNA
ccagcaggccgcccacgacacc

SEQ ID NO: 3830 - RNA, 22 nt, synthetic construct
  source 1..22: mol_type = other RNA
ccagcccctcacccaggccagc

SEQ ID NO: 3831 - RNA, 22 nt, synthetic construct
  source 1..22: mol_type = other RNA
ccagccggccagttccaaaccc

SEQ ID NO: 3832 - RNA, 22 nt, synthetic construct
  source 1..22: mol_type = other RNA
ccaggacccagactagcagcac

SEQ ID NO: 3833 - RNA, 22 nt, synthetic construct
  source 1..22: mol_type = other RNA
ccaggccagccggccagttcca

SEQ ID NO: 3834 - RNA, 22 nt, synthetic construct
  source 1..22: mol_type = other RNA
ccagggtttggaactggccggc

SEQ ID NO: 3835 - RNA, 22 nt, synthetic construct
  source 1..22: mol_type = other RNA
ccagttccaaaccctggtggtt

SEQ ID NO: 3836 - RNA, 22 nt, synthetic construct
  source 1..22: mol_type = other RNA
cccacagcccaccccagcccct

SEQ ID NO: 3837 - RNA, 22 nt, synthetic construct
  source 1..22: mol_type = other RNA
cccaccccagcccctcacccag

SEQ ID NO: 3838 - RNA, 22 nt, synthetic construct
  source 1..22: mol_type = other RNA
cccacgacaccaaccaccaggg

SEQ ID NO: 3839 - RNA, 22 nt, synthetic construct
  source 1..22: mol_type = other RNA
cccagactagcagcaccaggct

SEQ ID NO: 3840 - RNA, 22 nt, synthetic construct
  source 1..22: mol_type = other RNA
cccagcaggccgcccacgacac

SEQ ID NO: 3841 - RNA, 22 nt, synthetic construct
  source 1..22: mol_type = other RNA
cccagcccctcacccaggccag

SEQ ID NO: 3842 - RNA, 22 nt, synthetic construct
  source 1..22: mol_type = other RNA
cccaggccagccggccagttcc

SEQ ID NO: 3843 - RNA, 22 nt, synthetic construct
  source 1..22: mol_type = other RNA
ccccagcccctcacccaggcca

SEQ ID NO: 3844 - RNA, 22 nt, synthetic construct
  source 1..22: mol_type = other RNA
ccccgtcctaacccctgacctt

SEQ ID NO: 3845 - RNA, 22 nt, synthetic construct
  source 1..22: mol_type = other RNA
cccctgacctttgtgcccttcc

SEQ ID NO: 3846 - RNA, 22 nt, synthetic construct
  source 1..22: mol_type = other RNA
cccgggagcagatgacggccag

SEQ ID NO: 3847 - RNA, 22 nt, synthetic construct
  source 1..22: mol_type = other RNA
cccgggccgcacgaggtaacgt

SEQ ID NO: 3848 - RNA, 22 nt, synthetic construct
  source 1..22: mol_type = other RNA
cccgtcctaacccctgaccttt

SEQ ID NO: 3849 - RNA, 22 nt, synthetic construct
  source 1..22: mol_type = other RNA
ccctgacctttgtgcccttcca

SEQ ID NO: 3850 - RNA, 22 nt, synthetic construct
  source 1..22: mol_type = other RNA
ccctggtggttggtgtcgtggg

SEQ ID NO: 3851 - RNA, 22 nt, synthetic construct
  source 1..22: mol_type = other RNA
cccttccagagagaagggcaga

SEQ ID NO: 3852 - RNA, 22 nt, synthetic construct
  source 1..22: mol_type = other RNA
cccttctctctggaagggcaca

SEQ ID NO: 3853 - RNA, 22 nt, synthetic construct
  source 1..22: mol_type = other RNA
ccgaggggctgggatgacgtta

SEQ ID NO: 3854 - RNA, 22 nt, synthetic construct
  source 1..22: mol_type = other RNA
ccgcacgaggtaacgtcatccc

SEQ ID NO: 3855 - RNA, 22 nt, synthetic construct
  source 1..22: mol_type = other RNA
ccgcccacgacaccaaccacca

SEQ ID NO: 3856 - RNA, 22 nt, synthetic construct
  source 1..22: mol_type = other RNA
ccggccagttccaaaccctggt

SEQ ID NO: 3857 - RNA, 22 nt, synthetic construct
  source 1..22: mol_type = other RNA
ccgggagcagatgacggccagg

SEQ ID NO: 3858 - RNA, 22 nt, synthetic construct
  source 1..22: mol_type = other RNA
ccgggccgcacgaggtaacgtc

SEQ ID NO: 3859 - RNA, 22 nt, synthetic construct
  source 1..22: mol_type = other RNA
ccgtcatctgctcccgggccgc

SEQ ID NO: 3860 - RNA, 22 nt, synthetic construct
  source 1..22: mol_type = other RNA
ccgtcctaacccctgacctttg

SEQ ID NO: 3861 - RNA, 22 nt, synthetic construct
  source 1..22: mol_type = other RNA
cctaacccctgacctttgtgcc

SEQ ID NO: 3862 - RNA, 22 nt, synthetic construct
  source 1..22: mol_type = other RNA
cctcacccaggccagccggcca

SEQ ID NO: 3863 - RNA, 22 nt, synthetic construct
  source 1..22: mol_type = other RNA
cctcgtgcggcccgggagcaga

SEQ ID NO: 3864 - RNA, 22 nt, synthetic construct
  source 1..22: mol_type = other RNA
cctgacctttgtgcccttccag

SEQ ID NO: 3865 - RNA, 22 nt, synthetic construct
  source 1..22: mol_type = other RNA
cctgctgggcagcctggtgctg

SEQ ID NO: 3866 - RNA, 22 nt, synthetic construct
  source 1..22: mol_type = other RNA
cctggccgtcatctgctcccgg

SEQ ID NO: 3867 - RNA, 22 nt, synthetic construct
  source 1..22: mol_type = other RNA
cctgggtgaggggctggggtgg

SEQ ID NO: 3868 - RNA, 22 nt, synthetic construct
  source 1..22: mol_type = other RNA
cctggtgctgctagtctgggtc

SEQ ID NO: 3869 - RNA, 22 nt, synthetic construct
  source 1..22: mol_type = other RNA
cctggtggttggtgtcgtgggc

SEQ ID NO: 3870 - RNA, 22 nt, synthetic construct
  source 1..22: mol_type = other RNA
ccttccagagagaagggcagaa

SEQ ID NO: 3871 - RNA, 22 nt, synthetic construct
  source 1..22: mol_type = other RNA
ccttctctctggaagggcacaa

SEQ ID NO: 3872 - RNA, 22 nt, synthetic construct
  source 1..22: mol_type = other RNA
cctttgtgcccttccagagaga

SEQ ID NO: 3873 - RNA, 22 nt, synthetic construct
  source 1..22: mol_type = other RNA
cgacaccaaccaccagggtttg

SEQ ID NO: 3874 - RNA, 22 nt, synthetic construct
  source 1..22: mol_type = other RNA
cgaggggctgggatgacgttac

SEQ ID NO: 3875 - RNA, 22 nt, synthetic construct
  source 1..22: mol_type = other RNA
cgaggtaacgtcatcccagccc

SEQ ID NO: 3876 - RNA, 22 nt, synthetic construct
  source 1..22: mol_type = other RNA
cgcacgaggtaacgtcatccca

SEQ ID NO: 3877 - RNA, 22 nt, synthetic construct
  source 1..22: mol_type = other RNA
cgcccacgacaccaaccaccag

SEQ ID NO: 3878 - RNA, 22 nt, synthetic construct
  source 1..22: mol_type = other RNA
cggccaggacccagactagcag

SEQ ID NO: 3879 - RNA, 22 nt, synthetic construct
  source 1..22: mol_type = other RNA
cggccagttccaaaccctggtg

SEQ ID NO: 3880 - RNA, 22 nt, synthetic construct
  source 1..22: mol_type = other RNA
cggcccgggagcagatgacggc

SEQ ID NO: 3881 - RNA, 22 nt, synthetic construct
  source 1..22: mol_type = other RNA
cggcctgctgggcagcctggtg

SEQ ID NO: 3882 - RNA, 22 nt, synthetic construct
  source 1..22: mol_type = other RNA
cggctggcctgggtgaggggct

SEQ ID NO: 3883 - RNA, 22 nt, synthetic construct
  source 1..22: mol_type = other RNA
cgggagcagatgacggccagga

SEQ ID NO: 3884 - RNA, 22 nt, synthetic construct
  source 1..22: mol_type = other RNA
cgggccgcacgaggtaacgtca

SEQ ID NO: 3885 - RNA, 22 nt, synthetic construct
  source 1..22: mol_type = other RNA
cgtcatcccagcccctcggcct

SEQ ID NO: 3886 - RNA, 22 nt, synthetic construct
  source 1..22: mol_type = other RNA
cgtcatctgctcccgggccgca

SEQ ID NO: 3887 - RNA, 22 nt, synthetic construct
  source 1..22: mol_type = other RNA
cgtcctaacccctgacctttgt

SEQ ID NO: 3888 - RNA, 22 nt, synthetic construct
  source 1..22: mol_type = other RNA
cgtgcggcccgggagcagatga

SEQ ID NO: 3889 - RNA, 22 nt, synthetic construct
  source 1..22: mol_type = other RNA
cgttacctcgtgcggcccggga

SEQ ID NO: 3890 - RNA, 22 nt, synthetic construct
  source 1..22: mol_type = other RNA
ctaacccctgacctttgtgccc

SEQ ID NO: 3891 - RNA, 22 nt, synthetic construct
  source 1..22: mol_type = other RNA
ctagcagcaccaggctgcccag

SEQ ID NO: 3892 - RNA, 22 nt, synthetic construct
  source 1..22: mol_type = other RNA
ctagtctgggtcctggccgtca

SEQ ID NO: 3893 - RNA, 22 nt, synthetic construct
  source 1..22: mol_type = other RNA
ctcacccaggccagccggccag

SEQ ID NO: 3894 - RNA, 22 nt, synthetic construct
  source 1..22: mol_type = other RNA
ctcccgggccgcacgaggtaac

SEQ ID NO: 3895 - RNA, 22 nt, synthetic construct
  source 1..22: mol_type = other RNA
ctcgtgcggcccgggagcagat

SEQ ID NO: 3896 - RNA, 22 nt, synthetic construct
  source 1..22: mol_type = other RNA
ctctctggaagggcacaaaggt

SEQ ID NO: 3897 - RNA, 22 nt, synthetic construct
  source 1..22: mol_type = other RNA
ctctggaagggcacaaaggtca

SEQ ID NO: 3898 - RNA, 22 nt, synthetic construct
  source 1..22: mol_type = other RNA
ctgacctttgtgcccttccaga

SEQ ID NO: 3899 - RNA, 22 nt, synthetic construct
  source 1..22: mol_type = other RNA
ctgcccagcaggccgcccacga

SEQ ID NO: 3900 - RNA, 22 nt, synthetic construct
  source 1..22: mol_type = other RNA
ctgcccttctctctggaagggc

SEQ ID NO: 3901 - RNA, 22 nt, synthetic construct
  source 1..22: mol_type = other RNA
ctgctagtctgggtcctggccg

SEQ ID NO: 3902 - RNA, 22 nt, synthetic construct
  source 1..22: mol_type = other RNA
ctgctcccgggccgcacgaggt

SEQ ID NO: 3903 - RNA, 22 nt, synthetic construct
  source 1..22: mol_type = other RNA
ctgctgggcagcctggtgctgc

SEQ ID NO: 3904 - RNA, 22 nt, synthetic construct
  source 1..22: mol_type = other RNA
ctggaagggcacaaaggtcagg

SEQ ID NO: 3905 - RNA, 22 nt, synthetic construct
  source 1..22: mol_type = other RNA
ctggccggctggcctgggtgag

SEQ ID NO: 3906 - RNA, 22 nt, synthetic construct
  source 1..22: mol_type = other RNA
ctggccgtcatctgctcccggg

SEQ ID NO: 3907 - RNA, 22 nt, synthetic construct
  source 1..22: mol_type = other RNA
ctggcctgggtgaggggctggg

SEQ ID NO: 3908 - RNA, 22 nt, synthetic construct
  source 1..22: mol_type = other RNA
ctgggatgacgttacctcgtgc

SEQ ID NO: 3909 - RNA, 22 nt, synthetic construct
  source 1..22: mol_type = other RNA
ctgggcagcctggtgctgctag

SEQ ID NO: 3910 - RNA, 22 nt, synthetic construct
  source 1..22: mol_type = other RNA
ctggggtgggctgtgggcactt

SEQ ID NO: 3911 - RNA, 22 nt, synthetic construct
  source 1..22: mol_type = other RNA
ctgggtcctggccgtcatctgc

SEQ ID NO: 3912 - RNA, 22 nt, synthetic construct
  source 1..22: mol_type = other RNA
ctgggtgaggggctggggtggg

SEQ ID NO: 3913 - RNA, 22 nt, synthetic construct
  source 1..22: mol_type = other RNA
ctggtgctgctagtctgggtcc

SEQ ID NO: 3914 - RNA, 22 nt, synthetic construct
  source 1..22: mol_type = other RNA
ctggtggttggtgtcgtgggcg

SEQ ID NO: 3915 - RNA, 22 nt, synthetic construct
  source 1..22: mol_type = other RNA
ctgtgggcacttctgcccttct

SEQ ID NO: 3916 - RNA, 22 nt, synthetic construct
  source 1..22: mol_type = other RNA
cttccagagagaagggcagaag

SEQ ID NO: 3917 - RNA, 22 nt, synthetic construct
  source 1..22: mol_type = other RNA
cttctctctggaagggcacaaa

SEQ ID NO: 3918 - RNA, 22 nt, synthetic construct
  source 1..22: mol_type = other RNA
cttctgcccttctctctggaag

SEQ ID NO: 3919 - RNA, 22 nt, synthetic construct
  source 1..22: mol_type = other RNA
ctttgtgcccttccagagagaa

SEQ ID NO: 3920 - RNA, 22 nt, synthetic construct
  source 1..22: mol_type = other RNA
gaactggccggctggcctgggt

SEQ ID NO: 3921 - RNA, 22 nt, synthetic construct
  source 1..22: mol_type = other RNA
gaagggcacaaaggtcaggggt

SEQ ID NO: 3922 - RNA, 22 nt, synthetic construct
  source 1..22: mol_type = other RNA
gaagggcagaagtgcccacagc

SEQ ID NO: 3923 - RNA, 22 nt, synthetic construct
  source 1..22: mol_type = other RNA
gaagtgcccacagcccacccca

SEQ ID NO: 3924 - RNA, 22 nt, synthetic construct
  source 1..22: mol_type = other RNA
gacaccaaccaccagggtttgg

SEQ ID NO: 3925 - RNA, 22 nt, synthetic construct
  source 1..22: mol_type = other RNA
gacccagactagcagcaccagg

SEQ ID NO: 3926 - RNA, 22 nt, synthetic construct
  source 1..22: mol_type = other RNA
gaccccgtcctaacccctgacc

SEQ ID NO: 3927 - RNA, 22 nt, synthetic construct
  source 1..22: mol_type = other RNA
gacctttgtgcccttccagaga

SEQ ID NO: 3928 - RNA, 22 nt, synthetic construct
  source 1..22: mol_type = other RNA
gacggccaggacccagactagc

SEQ ID NO: 3929 - RNA, 22 nt, synthetic construct
  source 1..22: mol_type = other RNA
gacgttacctcgtgcggcccgg

SEQ ID NO: 3930 - RNA, 22 nt, synthetic construct
  source 1..22: mol_type = other RNA
gactagcagcaccaggctgccc

SEQ ID NO: 3931 - RNA, 22 nt, synthetic construct
  source 1..22: mol_type = other RNA
gagaagggcagaagtgcccaca

SEQ ID NO: 3932 - RNA, 22 nt, synthetic construct
  source 1..22: mol_type = other RNA
gagagaagggcagaagtgccca

SEQ ID NO: 3933 - RNA, 22 nt, synthetic construct
  source 1..22: mol_type = other RNA
gagcagatgacggccaggaccc

SEQ ID NO: 3934 - RNA, 22 nt, synthetic construct
  source 1..22: mol_type = other RNA
gaggggctgggatgacgttacc

SEQ ID NO: 3935 - RNA, 22 nt, synthetic construct
  source 1..22: mol_type = other RNA
gaggggctggggtgggctgtgg

SEQ ID NO: 3936 - RNA, 22 nt, synthetic construct
  source 1..22: mol_type = other RNA
gaggtaacgtcatcccagcccc

SEQ ID NO: 3937 - RNA, 22 nt, synthetic construct
  source 1..22: mol_type = other RNA
gatgacggccaggacccagact

SEQ ID NO: 3938 - RNA, 22 nt, synthetic construct
  source 1..22: mol_type = other RNA
gatgacgttacctcgtgcggcc

SEQ ID NO: 3939 - RNA, 22 nt, synthetic construct
  source 1..22: mol_type = other RNA
gcacaaaggtcaggggttagga

SEQ ID NO: 3940 - RNA, 22 nt, synthetic construct
  source 1..22: mol_type = other RNA
gcaccaggctgcccagcaggcc

SEQ ID NO: 3941 - RNA, 22 nt, synthetic construct
  source 1..22: mol_type = other RNA
gcacgaggtaacgtcatcccag

SEQ ID NO: 3942 - RNA, 22 nt, synthetic construct
  source 1..22: mol_type = other RNA
gcacttctgcccttctctctgg

SEQ ID NO: 3943 - RNA, 22 nt, synthetic construct
  source 1..22: mol_type = other RNA
gcagaagtgcccacagcccacc

SEQ ID NO: 3944 - RNA, 22 nt, synthetic construct
  source 1..22: mol_type = other RNA
gcagatgacggccaggacccag

SEQ ID NO: 3945 - RNA, 22 nt, synthetic construct
  source 1..22: mol_type = other RNA
gcagcaccaggctgcccagcag

SEQ ID NO: 3946 - RNA, 22 nt, synthetic construct
  source 1..22: mol_type = other RNA
gcagcctggtgctgctagtctg

SEQ ID NO: 3947 - RNA, 22 nt, synthetic construct
  source 1..22: mol_type = other RNA
gcaggccgaggggctgggatga

SEQ ID NO: 3948 - RNA, 22 nt, synthetic construct
  source 1..22: mol_type = other RNA
gcaggccgcccacgacaccaac

SEQ ID NO: 3949 - RNA, 22 nt, synthetic construct
  source 1..22: mol_type = other RNA
gccagccggccagttccaaacc

SEQ ID NO: 3950 - RNA, 22 nt, synthetic construct
  source 1..22: mol_type = other RNA
gccaggacccagactagcagca

SEQ ID NO: 3951 - RNA, 22 nt, synthetic construct
  source 1..22: mol_type = other RNA
gccagttccaaaccctggtggt

SEQ ID NO: 3952 - RNA, 22 nt, synthetic construct
  source 1..22: mol_type = other RNA
gcccaccccagcccctcaccca

SEQ ID NO: 3953 - RNA, 22 nt, synthetic construct
  source 1..22: mol_type = other RNA
gcccacgacaccaaccaccagg

SEQ ID NO: 3954 - RNA, 22 nt, synthetic construct
  source 1..22: mol_type = other RNA
gcccagcaggccgcccacgaca

SEQ ID NO: 3955 - RNA, 22 nt, synthetic construct
  source 1..22: mol_type = other RNA
gcccgggagcagatgacggcca

SEQ ID NO: 3956 - RNA, 22 nt, synthetic construct
  source 1..22: mol_type = other RNA
gcccttccagagagaagggcag

SEQ ID NO: 3957 - RNA, 22 nt, synthetic construct
  source 1..22: mol_type = other RNA
gcccttctctctggaagggcac

SEQ ID NO: 3958 - RNA, 22 nt, synthetic construct
  source 1..22: mol_type = other RNA
gccgaggggctgggatgacgtt

SEQ ID NO: 3959 - RNA, 22 nt, synthetic construct
  source 1..22: mol_type = other RNA
gccgcacgaggtaacgtcatcc

SEQ ID NO: 3960 - RNA, 22 nt, synthetic construct
  source 1..22: mol_type = other RNA
gccgcccacgacaccaaccacc

SEQ ID NO: 3961 - RNA, 22 nt, synthetic construct
  source 1..22: mol_type = other RNA
gccggccagttccaaaccctgg

SEQ ID NO: 3962 - RNA, 22 nt, synthetic construct
  source 1..22: mol_type = other RNA
gccgtcatctgctcccgggccg

SEQ ID NO: 3963 - RNA, 22 nt, synthetic construct
  source 1..22: mol_type = other RNA
gcctgctgggcagcctggtgct

SEQ ID NO: 3964 - RNA, 22 nt, synthetic construct
  source 1..22: mol_type = other RNA
gcctgggtgaggggctggggtg

SEQ ID NO: 3965 - RNA, 22 nt, synthetic construct
  source 1..22: mol_type = other RNA
gcctggtgctgctagtctgggt

SEQ ID NO: 3966 - RNA, 22 nt, synthetic construct
  source 1..22: mol_type = other RNA
gcggcccgggagcagatgacgg

SEQ ID NO: 3967 - RNA, 22 nt, synthetic construct
  source 1..22: mol_type = other RNA
gcggcctgctgggcagcctggt

SEQ ID NO: 3968 - RNA, 22 nt, synthetic construct
  source 1..22: mol_type = other RNA
gctagtctgggtcctggccgtc

SEQ ID NO: 3969 - RNA, 22 nt, synthetic construct
  source 1..22: mol_type = other RNA
gctcccgggccgcacgaggtaa

SEQ ID NO: 3970 - RNA, 22 nt, synthetic construct
  source 1..22: mol_type = other RNA
gctgctagtctgggtcctggcc

SEQ ID NO: 3971 - RNA, 22 nt, synthetic construct
  source 1..22: mol_type = other RNA
gctggcctgggtgaggggctgg

SEQ ID NO: 3972 - RNA, 22 nt, synthetic construct
  source 1..22: mol_type = other RNA
gctgggatgacgttacctcgtg

SEQ ID NO: 3973 - RNA, 22 nt, synthetic construct
  source 1..22: mol_type = other RNA
gctgggcagcctggtgctgcta

SEQ ID NO: 3974 - RNA, 22 nt, synthetic construct
  source 1..22: mol_type = other RNA
gctggggtgggctgtgggcact

SEQ ID NO: 3975 - RNA, 22 nt, synthetic construct
  source 1..22: mol_type = other RNA
gctgtgggcacttctgcccttc

SEQ ID NO: 3976 - RNA, 22 nt, synthetic construct
  source 1..22: mol_type = other RNA
ggaactggccggctggcctggg

SEQ ID NO: 3977 - RNA, 22 nt, synthetic construct
  source 1..22: mol_type = other RNA
ggaagggcacaaaggtcagggg

SEQ ID NO: 3978 - RNA, 22 nt, synthetic construct
  source 1..22: mol_type = other RNA
ggacccagactagcagcaccag

SEQ ID NO: 3979 - RNA, 22 nt, synthetic construct
  source 1..22: mol_type = other RNA
ggagcagatgacggccaggacc

SEQ ID NO: 3980 - RNA, 22 nt, synthetic construct
  source 1..22: mol_type = other RNA
ggatgacgttacctcgtgcggc

SEQ ID NO: 3981 - RNA, 22 nt, synthetic construct
  source 1..22: mol_type = other RNA
ggcacaaaggtcaggggttagg

SEQ ID NO: 3982 - RNA, 22 nt, synthetic construct
  source 1..22: mol_type = other RNA
ggcacttctgcccttctctctg

SEQ ID NO: 3983 - RNA, 22 nt, synthetic construct
  source 1..22: mol_type = other RNA
ggcagaagtgcccacagcccac

SEQ ID NO: 3984 - RNA, 22 nt, synthetic construct
  source 1..22: mol_type = other RNA
ggcagcctggtgctgctagtct

SEQ ID NO: 3985 - RNA, 22 nt, synthetic construct
  source 1..22: mol_type = other RNA
ggcaggccgaggggctgggatg

SEQ ID NO: 3986 - RNA, 22 nt, synthetic construct
  source 1..22: mol_type = other RNA
ggccagccggccagttccaaac

SEQ ID NO: 3987 - RNA, 22 nt, synthetic construct
  source 1..22: mol_type = other RNA
ggccaggacccagactagcagc

SEQ ID NO: 3988 - RNA, 22 nt, synthetic construct
  source 1..22: mol_type = other RNA
ggccagttccaaaccctggtgg

SEQ ID NO: 3989 - RNA, 22 nt, synthetic construct
  source 1..22: mol_type = other RNA
ggcccgggagcagatgacggcc

SEQ ID NO: 3990 - RNA, 22 nt, synthetic construct
  source 1..22: mol_type = other RNA
ggccgaggggctgggatgacgt

SEQ ID NO: 3991 - RNA, 22 nt, synthetic construct
  source 1..22: mol_type = other RNA
ggccgcacgaggtaacgtcatc

SEQ ID NO: 3992 - RNA, 22 nt, synthetic construct
  source 1..22: mol_type = other RNA
ggccgcccacgacaccaaccac

SEQ ID NO: 3993 - RNA, 22 nt, synthetic construct
  source 1..22: mol_type = other RNA
ggccgtcatctgctcccgggcc

SEQ ID NO: 3994 - RNA, 22 nt, synthetic construct
  source 1..22: mol_type = other RNA
ggcctgctgggcagcctggtgc

SEQ ID NO: 3995 - RNA, 22 nt, synthetic construct
  source 1..22: mol_type = other RNA
ggcctgggtgaggggctggggt

SEQ ID NO: 3996 - RNA, 22 nt, synthetic construct
  source 1..22: mol_type = other RNA
ggctggcctgggtgaggggctg

SEQ ID NO: 3997 - RNA, 22 nt, synthetic construct
  source 1..22: mol_type = other RNA
ggctgggatgacgttacctcgt

SEQ ID NO: 3998 - RNA, 22 nt, synthetic construct
  source 1..22: mol_type = other RNA
ggctggggtgggctgtgggcac

SEQ ID NO: 3999 - RNA, 22 nt, synthetic construct
  source 1..22: mol_type = other RNA
ggctgtgggcacttctgccctt

SEQ ID NO: 4000 - RNA, 22 nt, synthetic construct
  source 1..22: mol_type = other RNA
gggagcagatgacggccaggac

SEQ ID NO: 4001 - RNA, 22 nt, synthetic construct
  source 1..22: mol_type = other RNA
gggatgacgttacctcgtgcgg

SEQ ID NO: 4002 - RNA, 22 nt, synthetic construct
  source 1..22: mol_type = other RNA
gggcacaaaggtcaggggttag

SEQ ID NO: 4003 - RNA, 22 nt, synthetic construct
  source 1..22: mol_type = other RNA
gggcacttctgcccttctctct

SEQ ID NO: 4004 - RNA, 22 nt, synthetic construct
  source 1..22: mol_type = other RNA
gggcagaagtgcccacagccca

SEQ ID NO: 4005 - RNA, 22 nt, synthetic construct
  source 1..22: mol_type = other RNA
gggcagcctggtgctgctagtc

SEQ ID NO: 4006 - RNA, 22 nt, synthetic construct
  source 1..22: mol_type = other RNA
gggcaggccgaggggctgggat

SEQ ID NO: 4007 - RNA, 22 nt, synthetic construct
  source 1..22: mol_type = other RNA
gggccgcacgaggtaacgtcat

SEQ ID NO: 4008 - RNA, 22 nt, synthetic construct
  source 1..22: mol_type = other RNA
gggctgggatgacgttacctcg

SEQ ID NO: 4009 - RNA, 22 nt, synthetic construct
  source 1..22: mol_type = other RNA
gggctggggtgggctgtgggca

SEQ ID NO: 4010 - RNA, 22 nt, synthetic construct
  source 1..22: mol_type = other RNA
gggctgtgggcacttctgccct

SEQ ID NO: 4011 - RNA, 22 nt, synthetic construct
  source 1..22: mol_type = other RNA
ggggctgggatgacgttacctc

SEQ ID NO: 4012 - RNA, 22 nt, synthetic construct
  source 1..22: mol_type = other RNA
ggggtgggctgtgggcacttct

SEQ ID NO: 4013 - RNA, 22 nt, synthetic construct
  source 1..22: mol_type = other RNA
gggtcctggccgtcatctgctc

SEQ ID NO: 4014 - RNA, 22 nt, synthetic construct
  source 1..22: mol_type = other RNA
gggtgaggggctggggtgggct

SEQ ID NO: 4015 - RNA, 22 nt, synthetic construct
  source 1..22: mol_type = other RNA
gggtgggctgtgggcacttctg

SEQ ID NO: 4016 - RNA, 22 nt, synthetic construct
  source 1..22: mol_type = other RNA
gggtttggaactggccggctgg

SEQ ID NO: 4017 - RNA, 22 nt, synthetic construct
  source 1..22: mol_type = other RNA
ggtaacgtcatcccagcccctc

SEQ ID NO: 4018 - RNA, 22 nt, synthetic construct
  source 1..22: mol_type = other RNA
ggtcctggccgtcatctgctcc

SEQ ID NO: 4019 - RNA, 22 nt, synthetic construct
  source 1..22: mol_type = other RNA
ggtgaggggctggggtgggctg

SEQ ID NO: 4020 - RNA, 22 nt, synthetic construct
  source 1..22: mol_type = other RNA
ggtgctgctagtctgggtcctg

SEQ ID NO: 4021 - RNA, 22 nt, synthetic construct
  source 1..22: mol_type = other RNA
ggtgggctgtgggcacttctgc

SEQ ID NO: 4022 - RNA, 22 nt, synthetic construct
  source 1..22: mol_type = other RNA
ggtggttggtgtcgtgggcggc

SEQ ID NO: 4023 - RNA, 22 nt, synthetic construct
  source 1..22: mol_type = other RNA
ggtgtcgtgggcggcctgctgg

SEQ ID NO: 4024 - RNA, 22 nt, synthetic construct
  source 1..22: mol_type = other RNA
ggttggtgtcgtgggcggcctg

SEQ ID NO: 4025 - RNA, 22 nt, synthetic construct
  source 1..22: mol_type = other RNA
ggtttggaactggccggctggc

SEQ ID NO: 4026 - RNA, 22 nt, synthetic construct
  source 1..22: mol_type = other RNA
gtaacgtcatcccagcccctcg

SEQ ID NO: 4027 - RNA, 22 nt, synthetic construct
  source 1..22: mol_type = other RNA
gtcatcccagcccctcggcctg

SEQ ID NO: 4028 - RNA, 22 nt, synthetic construct
  source 1..22: mol_type = other RNA
gtcatctgctcccgggccgcac

SEQ ID NO: 4029 - RNA, 22 nt, synthetic construct
  source 1..22: mol_type = other RNA
gtcctaacccctgacctttgtg

SEQ ID NO: 4030 - RNA, 22 nt, synthetic construct
  source 1..22: mol_type = other RNA
gtcctggccgtcatctgctccc

SEQ ID NO: 4031 - RNA, 22 nt, synthetic construct
  source 1..22: mol_type = other RNA
gtcgtgggcggcctgctgggca

SEQ ID NO: 4032 - RNA, 22 nt, synthetic construct
  source 1..22: mol_type = other RNA
gtctgggtcctggccgtcatct

SEQ ID NO: 4033 - RNA, 22 nt, synthetic construct
  source 1..22: mol_type = other RNA
gtgaggggctggggtgggctgt

SEQ ID NO: 4034 - RNA, 22 nt, synthetic construct
  source 1..22: mol_type = other RNA
gtgcccacagcccaccccagcc

SEQ ID NO: 4035 - RNA, 22 nt, synthetic construct
  source 1..22: mol_type = other RNA
gtgcccttccagagagaagggc

SEQ ID NO: 4036 - RNA, 22 nt, synthetic construct
  source 1..22: mol_type = other RNA
gtgcggcccgggagcagatgac

SEQ ID NO: 4037 - RNA, 22 nt, synthetic construct
  source 1..22: mol_type = other RNA
gtgctgctagtctgggtcctgg

SEQ ID NO: 4038 - RNA, 22 nt, synthetic construct
  source 1..22: mol_type = other RNA
gtgggcacttctgcccttctct

SEQ ID NO: 4039 - RNA, 22 nt, synthetic construct
  source 1..22: mol_type = other RNA
gtgggctgtgggcacttctgcc

SEQ ID NO: 4040 - RNA, 22 nt, synthetic construct
  source 1..22: mol_type = other RNA
gtggttggtgtcgtgggcggcc

SEQ ID NO: 4041 - RNA, 22 nt, synthetic construct
  source 1..22: mol_type = other RNA
gtgtcgtgggcggcctgctggg

SEQ ID NO: 4042 - RNA, 22 nt, synthetic construct
  source 1..22: mol_type = other RNA
gttacctcgtgcggcccgggag

SEQ ID NO: 4043 - RNA, 22 nt, synthetic construct
  source 1..22: mol_type = other RNA
gttagggcagggcaggccgagg

SEQ ID NO: 4044 - RNA, 22 nt, synthetic construct
  source 1..22: mol_type = other RNA
gttccaaaccctggtggttggt

SEQ ID NO: 4045 - RNA, 22 nt, synthetic construct
  source 1..22: mol_type = other RNA
gttggtgtcgtgggcggcctgc

SEQ ID NO: 4046 - RNA, 22 nt, synthetic construct
  source 1..22: mol_type = other RNA
gtttggaactggccggctggcc

SEQ ID NO: 4047 - RNA, 22 nt, synthetic construct
  source 1..22: mol_type = other RNA
taacccctgacctttgtgccct

SEQ ID NO: 4048 - RNA, 22 nt, synthetic construct
  source 1..22: mol_type = other RNA
taacgtcatcccagcccctcgg

SEQ ID NO: 4049 - RNA, 22 nt, synthetic construct
  source 1..22: mol_type = other RNA
tacctcgtgcggcccgggagca

SEQ ID NO: 4050 - RNA, 22 nt, synthetic construct
  source 1..22: mol_type = other RNA
tagcagcaccaggctgcccagc

SEQ ID NO: 4051 - RNA, 22 nt, synthetic construct
  source 1..22: mol_type = other RNA
tagggcagggcaggccgagggg

SEQ ID NO: 4052 - RNA, 22 nt, synthetic construct
  source 1..22: mol_type = other RNA
tagtctgggtcctggccgtcat

SEQ ID NO: 4053 - RNA, 22 nt, synthetic construct
  source 1..22: mol_type = other RNA
tcacccaggccagccggccagt

SEQ ID NO: 4054 - RNA, 22 nt, synthetic construct
  source 1..22: mol_type = other RNA
tcatcccagcccctcggcctgc

SEQ ID NO: 4055 - RNA, 22 nt, synthetic construct
  source 1..22: mol_type = other RNA
tcatctgctcccgggccgcacg

SEQ ID NO: 4056 - RNA, 22 nt, synthetic construct
  source 1..22: mol_type = other RNA
tccaaaccctggtggttggtgt

SEQ ID NO: 4057 - RNA, 22 nt, synthetic construct
  source 1..22: mol_type = other RNA
tccagagagaagggcagaagtg

SEQ ID NO: 4058 - RNA, 22 nt, synthetic construct
  source 1..22: mol_type = other RNA
tcccagcccctcggcctgccct

SEQ ID NO: 4059 - RNA, 22 nt, synthetic construct
  source 1..22: mol_type = other RNA
tcccgggccgcacgaggtaacg

SEQ ID NO: 4060 - RNA, 22 nt, synthetic construct
  source 1..22: mol_type = other RNA
tcctaacccctgacctttgtgc

SEQ ID NO: 4061 - RNA, 22 nt, synthetic construct
  source 1..22: mol_type = other RNA
tcctggccgtcatctgctcccg

SEQ ID NO: 4062 - RNA, 22 nt, synthetic construct
  source 1..22: mol_type = other RNA
tcgtgcggcccgggagcagatg

SEQ ID NO: 4063 - RNA, 22 nt, synthetic construct
  source 1..22: mol_type = other RNA
tcgtgggcggcctgctgggcag

SEQ ID NO: 4064 - RNA, 22 nt, synthetic construct
  source 1..22: mol_type = other RNA
tctctctggaagggcacaaagg

SEQ ID NO: 4065 - RNA, 22 nt, synthetic construct
  source 1..22: mol_type = other RNA
tctctggaagggcacaaaggtc

SEQ ID NO: 4066 - RNA, 22 nt, synthetic construct
  source 1..22: mol_type = other RNA
tctgcccttctctctggaaggg

SEQ ID NO: 4067 - RNA, 22 nt, synthetic construct
  source 1..22: mol_type = other RNA
tctgctcccgggccgcacgagg

SEQ ID NO: 4068 - RNA, 22 nt, synthetic construct
  source 1..22: mol_type = other RNA
tctggaagggcacaaaggtcag

SEQ ID NO: 4069 - RNA, 22 nt, synthetic construct
  source 1..22: mol_type = other RNA
tctgggtcctggccgtcatctg

SEQ ID NO: 4070 - RNA, 22 nt, synthetic construct
  source 1..22: mol_type = other RNA
tgaccccgtcctaacccctgac

SEQ ID NO: 4071 - RNA, 22 nt, synthetic construct
  source 1..22: mol_type = other RNA
tgacctttgtgcccttccagag

SEQ ID NO: 4072 - RNA, 22 nt, synthetic construct
  source 1..22: mol_type = other RNA
tgacggccaggacccagactag

SEQ ID NO: 4073 - RNA, 22 nt, synthetic construct
  source 1..22: mol_type = other RNA
tgacgttacctcgtgcggcccg

SEQ ID NO: 4074 - RNA, 22 nt, synthetic construct
  source 1..22: mol_type = other RNA
tgaggggctggggtgggctgtg

SEQ ID NO: 4075 - RNA, 22 nt, synthetic construct
  source 1..22: mol_type = other RNA
tgcccacagcccaccccagccc

SEQ ID NO: 4076 - RNA, 22 nt, synthetic construct
  source 1..22: mol_type = other RNA
tgcccagcaggccgcccacgac

SEQ ID NO: 4077 - RNA, 22 nt, synthetic construct
  source 1..22: mol_type = other RNA
tgcccttccagagagaagggca

SEQ ID NO: 4078 - RNA, 22 nt, synthetic construct
  source 1..22: mol_type = other RNA
tgcccttctctctggaagggca

SEQ ID NO: 4079 - RNA, 22 nt, synthetic construct
  source 1..22: mol_type = other RNA
tgcggcccgggagcagatgacg

SEQ ID NO: 4080 - RNA, 22 nt, synthetic construct
  source 1..22: mol_type = other RNA
tgctagtctgggtcctggccgt

SEQ ID NO: 4081 - RNA, 22 nt, synthetic construct
  source 1..22: mol_type = other RNA
tgctcccgggccgcacgaggta

SEQ ID NO: 4082 - RNA, 22 nt, synthetic construct
  source 1..22: mol_type = other RNA
tgctgctagtctgggtcctggc

SEQ ID NO: 4083 - RNA, 22 nt, synthetic construct
  source 1..22: mol_type = other RNA
tgctgggcagcctggtgctgct

SEQ ID NO: 4084 - RNA, 22 nt, synthetic construct
  source 1..22: mol_type = other RNA
tggaactggccggctggcctgg

SEQ ID NO: 4085 - RNA, 22 nt, synthetic construct
  source 1..22: mol_type = other RNA
tggaagggcacaaaggtcaggg

SEQ ID NO: 4086 - RNA, 22 nt, synthetic construct
  source 1..22: mol_type = other RNA
tggccggctggcctgggtgagg

SEQ ID NO: 4087 - RNA, 22 nt, synthetic construct
  source 1..22: mol_type = other RNA
tggccgtcatctgctcccgggc

SEQ ID NO: 4088 - RNA, 22 nt, synthetic construct
  source 1..22: mol_type = other RNA
tggcctgggtgaggggctgggg

SEQ ID NO: 4089 - RNA, 22 nt, synthetic construct
  source 1..22: mol_type = other RNA
tgggatgacgttacctcgtgcg

SEQ ID NO: 4090 - RNA, 22 nt, synthetic construct
  source 1..22: mol_type = other RNA
tgggcacttctgcccttctctc

SEQ ID NO: 4091 - RNA, 22 nt, synthetic construct
  source 1..22: mol_type = other RNA
tgggcagcctggtgctgctagt

SEQ ID NO: 4092 - RNA, 22 nt, synthetic construct
  source 1..22: mol_type = other RNA
tgggcggcctgctgggcagcct

SEQ ID NO: 4093 - RNA, 22 nt, synthetic construct
  source 1..22: mol_type = other RNA
tgggctgtgggcacttctgccc

SEQ ID NO: 4094 - RNA, 22 nt, synthetic construct
  source 1..22: mol_type = other RNA
tggggtgggctgtgggcacttc

SEQ ID NO: 4095 - RNA, 22 nt, synthetic construct
  source 1..22: mol_type = other RNA
tgggtcctggccgtcatctgct

SEQ ID NO: 4096 - RNA, 22 nt, synthetic construct
  source 1..22: mol_type = other RNA
tgggtgaggggctggggtgggc

SEQ ID NO: 4097 - RNA, 22 nt, synthetic construct
  source 1..22: mol_type = other RNA
tggtgctgctagtctgggtcct

SEQ ID NO: 4098 - RNA, 22 nt, synthetic construct
  source 1..22: mol_type = other RNA
tggtggttggtgtcgtgggcgg

SEQ ID NO: 4099 - RNA, 22 nt, synthetic construct
  source 1..22: mol_type = other RNA
tggtgtcgtgggcggcctgctg

SEQ ID NO: 4100 - RNA, 22 nt, synthetic construct
  source 1..22: mol_type = other RNA
tggttggtgtcgtgggcggcct

SEQ ID NO: 4101 - RNA, 22 nt, synthetic construct
  source 1..22: mol_type = other RNA
tgtcgtgggcggcctgctgggc

SEQ ID NO: 4102 - RNA, 22 nt, synthetic construct
  source 1..22: mol_type = other RNA
tgtgcccttccagagagaaggg

SEQ ID NO: 4103 - RNA, 22 nt, synthetic construct
  source 1..22: mol_type = other RNA
tgtgggcacttctgcccttctc

SEQ ID NO: 4104 - RNA, 22 nt, synthetic construct
  source 1..22: mol_type = other RNA
ttacctcgtgcggcccgggagc

SEQ ID NO: 4105 - RNA, 22 nt, synthetic construct
  source 1..22: mol_type = other RNA
ttagggcagggcaggccgaggg

SEQ ID NO: 4106 - RNA, 22 nt, synthetic construct
  source 1..22: mol_type = other RNA
ttccaaaccctggtggttggtg

SEQ ID NO: 4107 - RNA, 22 nt, synthetic construct
  source 1..22: mol_type = other RNA
ttccagagagaagggcagaagt

SEQ ID NO: 4108 - RNA, 22 nt, synthetic construct
  source 1..22: mol_type = other RNA
ttctctctggaagggcacaaag

SEQ ID NO: 4109 - RNA, 22 nt, synthetic construct
  source 1..22: mol_type = other RNA
ttctgcccttctctctggaagg

SEQ ID NO: 4110 - RNA, 22 nt, synthetic construct
  source 1..22: mol_type = other RNA
ttggaactggccggctggcctg

SEQ ID NO: 4111 - RNA, 22 nt, synthetic construct
  source 1..22: mol_type = other RNA
ttggtgtcgtgggcggcctgct

SEQ ID NO: 4112 - RNA, 22 nt, synthetic construct
  source 1..22: mol_type = other RNA
ttgtgcccttccagagagaagg

SEQ ID NO: 4113 - RNA, 22 nt, synthetic construct
  source 1..22: mol_type = other RNA
tttggaactggccggctggcct

SEQ ID NO: 4114 - RNA, 22 nt, synthetic construct
  source 1..22: mol_type = other RNA
tttgtgcccttccagagagaag

SEQ ID NO: 4115 - RNA, 20 nt, synthetic construct
  source 1..20: mol_type = other RNA
aaaagagtgagactcaccag

SEQ ID NO: 4116 - RNA, 20 nt, synthetic construct
  source 1..20: mol_type = other RNA
aaacacacttggggtcacca

SEQ ID NO: 4117 - RNA, 20 nt, synthetic construct
  source 1..20: mol_type = other RNA
aaagagtgagactcaccagg

SEQ ID NO: 4118 - RNA, 20 nt, synthetic construct
  source 1..20: mol_type = other RNA
aacacacttggggtcaccag

SEQ ID NO: 4119 - RNA, 20 nt, synthetic construct
  source 1..20: mol_type = other RNA
aagagtgagactcaccaggg

SEQ ID NO: 4120 - RNA, 20 nt, synthetic construct
  source 1..20: mol_type = other RNA
aaggcacagtggatcatgca

SEQ ID NO: 4121 - RNA, 20 nt, synthetic construct
  source 1..20: mol_type = other RNA
aagtgtgtttctctgcaggg

SEQ ID NO: 4122 - RNA, 20 nt, synthetic construct
  source 1..20: mol_type = other RNA
aataggagccaggcgcaccg

SEQ ID NO: 4123 - RNA, 20 nt, synthetic construct
  source 1..20: mol_type = other RNA
acaataggagccaggcgcac

SEQ ID NO: 4124 - RNA, 20 nt, synthetic construct
  source 1..20: mol_type = other RNA
acacacttggggtcaccagg

SEQ ID NO: 4125 - RNA, 20 nt, synthetic construct
  source 1..20: mol_type = other RNA
acagtggatcatgcaggaaa

SEQ ID NO: 4126 - RNA, 20 nt, synthetic construct
  source 1..20: mol_type = other RNA
accaggggctggccggtgcg

SEQ ID NO: 4127 - RNA, 20 nt, synthetic construct
  source 1..20: mol_type = other RNA
accccaagtgtgtttctctg

SEQ ID NO: 4128 - RNA, 20 nt, synthetic construct
  source 1..20: mol_type = other RNA
accggccagcccctggtgag

SEQ ID NO: 4129 - RNA, 20 nt, synthetic construct
  source 1..20: mol_type = other RNA
actcaccaggggctggccgg

SEQ ID NO: 4130 - RNA, 20 nt, synthetic construct
  source 1..20: mol_type = other RNA
actcttttcctgcatgatcc

SEQ ID NO: 4131 - RNA, 20 nt, synthetic construct
  source 1..20: mol_type = other RNA
agaaacacacttggggtcac

SEQ ID NO: 4132 - RNA, 20 nt, synthetic construct
  source 1..20: mol_type = other RNA
agactcaccaggggctggcc

SEQ ID NO: 4133 - RNA, 20 nt, synthetic construct
  source 1..20: mol_type = other RNA
agagaaacacacttggggtc

SEQ ID NO: 4134 - RNA, 20 nt, synthetic construct
  source 1..20: mol_type = other RNA
agagtgagactcaccagggg

SEQ ID NO: 4135 - RNA, 20 nt, synthetic construct
  source 1..20: mol_type = other RNA
agccaggcgcaccggccagc

SEQ ID NO: 4136 - RNA, 20 nt, synthetic construct
  source 1..20: mol_type = other RNA
agcccctggtgagtctcact

SEQ ID NO: 4137 - RNA, 20 nt, synthetic construct
  source 1..20: mol_type = other RNA
aggaaaagagtgagactcac

SEQ ID NO: 4138 - RNA, 20 nt, synthetic construct
  source 1..20: mol_type = other RNA
aggagccaggcgcaccggcc

SEQ ID NO: 4139 - RNA, 20 nt, synthetic construct
  source 1..20: mol_type = other RNA
aggcacagtggatcatgcag

SEQ ID NO: 4140 - RNA, 20 nt, synthetic construct
  source 1..20: mol_type = other RNA
aggcgcaccggccagcccct

SEQ ID NO: 4141 - RNA, 20 nt, synthetic construct
  source 1..20: mol_type = other RNA
agggacaataggagccaggc

SEQ ID NO: 4142 - RNA, 20 nt, synthetic construct
  source 1..20: mol_type = other RNA
aggggctggccggtgcgcct

SEQ ID NO: 4143 - RNA, 20 nt, synthetic construct
  source 1..20: mol_type = other RNA
agggtcggcctggtgacccc

SEQ ID NO: 4144 - RNA, 20 nt, synthetic construct
  source 1..20: mol_type = other RNA
agtctcactcttttcctgca

SEQ ID NO: 4145 - RNA, 20 nt, synthetic construct
  source 1..20: mol_type = other RNA
agtgagactcaccaggggct

SEQ ID NO: 4146 - RNA, 20 nt, synthetic construct
  source 1..20: mol_type = other RNA
agtggatcatgcaggaaaag

SEQ ID NO: 4147 - RNA, 20 nt, synthetic construct
  source 1..20: mol_type = other RNA
agtgtgtttctctgcaggga

SEQ ID NO: 4148 - RNA, 20 nt, synthetic construct
  source 1..20: mol_type = other RNA
ataggagccaggcgcaccgg

SEQ ID NO: 4149 - RNA, 20 nt, synthetic construct
  source 1..20: mol_type = other RNA
atcatgcaggaaaagagtga

SEQ ID NO: 4150 - RNA, 20 nt, synthetic construct
  source 1..20: mol_type = other RNA
atgcaggaaaagagtgagac

SEQ ID NO: 4151 - RNA, 20 nt, synthetic construct
  source 1..20: mol_type = other RNA
attgtccctgcagagaaaca

SEQ ID NO: 4152 - RNA, 20 nt, synthetic construct
  source 1..20: mol_type = other RNA
caagtgtgtttctctgcagg

SEQ ID NO: 4153 - RNA, 20 nt, synthetic construct
  source 1..20: mol_type = other RNA
caataggagccaggcgcacc

SEQ ID NO: 4154 - RNA, 20 nt, synthetic construct
  source 1..20: mol_type = other RNA
cacagtggatcatgcaggaa

SEQ ID NO: 4155 - RNA, 20 nt, synthetic construct
  source 1..20: mol_type = other RNA
caccaggggctggccggtgc

SEQ ID NO: 4156 - RNA, 20 nt, synthetic construct
  source 1..20: mol_type = other RNA
caccggccagcccctggtga

SEQ ID NO: 4157 - RNA, 20 nt, synthetic construct
  source 1..20: mol_type = other RNA
cactcttttcctgcatgatc

SEQ ID NO: 4158 - RNA, 20 nt, synthetic construct
  source 1..20: mol_type = other RNA
cagagaaacacacttggggt

SEQ ID NO: 4159 - RNA, 20 nt, synthetic construct
  source 1..20: mol_type = other RNA
cagcccctggtgagtctcac

SEQ ID NO: 4160 - RNA, 20 nt, synthetic construct
  source 1..20: mol_type = other RNA
caggaaaagagtgagactca

SEQ ID NO: 4161 - RNA, 20 nt, synthetic construct
  source 1..20: mol_type = other RNA
cagggacaataggagccagg

SEQ ID NO: 4162 - RNA, 20 nt, synthetic construct
  source 1..20: mol_type = other RNA
cagtggatcatgcaggaaaa

SEQ ID NO: 4163 - RNA, 20 nt, synthetic construct
  source 1..20: mol_type = other RNA
catgcaggaaaagagtgaga

SEQ ID NO: 4164 - RNA, 20 nt, synthetic construct
  source 1..20: mol_type = other RNA
ccaagtgtgtttctctgcag

SEQ ID NO: 4165 - RNA, 20 nt, synthetic construct
  source 1..20: mol_type = other RNA
ccagcccctggtgagtctca

SEQ ID NO: 4166 - RNA, 20 nt, synthetic construct
  source 1..20: mol_type = other RNA
cccaagtgtgtttctctgca

SEQ ID NO: 4167 - RNA, 20 nt, synthetic construct
  source 1..20: mol_type = other RNA
ccccaagtgtgtttctctgc

SEQ ID NO: 4168 - RNA, 20 nt, synthetic construct
  source 1..20: mol_type = other RNA
cccctggtgagtctcactct

SEQ ID NO: 4169 - RNA, 20 nt, synthetic construct
  source 1..20: mol_type = other RNA
ccctgcagagaaacacactt

SEQ ID NO: 4170 - RNA, 20 nt, synthetic construct
  source 1..20: mol_type = other RNA
ccctggtgagtctcactctt

SEQ ID NO: 4171 - RNA, 20 nt, synthetic construct
  source 1..20: mol_type = other RNA
ccggccagcccctggtgagt

SEQ ID NO: 4172 - RNA, 20 nt, synthetic construct
  source 1..20: mol_type = other RNA
ccggtgcgcctggctcctat

SEQ ID NO: 4173 - RNA, 20 nt, synthetic construct
  source 1..20: mol_type = other RNA
cctattgtccctgcagagaa

SEQ ID NO: 4174 - RNA, 20 nt, synthetic construct
  source 1..20: mol_type = other RNA
cctgcagagaaacacacttg

SEQ ID NO: 4175 - RNA, 20 nt, synthetic construct
  source 1..20: mol_type = other RNA
cctggctcctattgtccctg

SEQ ID NO: 4176 - RNA, 20 nt, synthetic construct
  source 1..20: mol_type = other RNA
cctggtgaccccaagtgtgt

SEQ ID NO: 4177 - RNA, 20 nt, synthetic construct
  source 1..20: mol_type = other RNA
cctggtgagtctcactcttt

SEQ ID NO: 4178 - RNA, 20 nt, synthetic construct
  source 1..20: mol_type = other RNA
cgcaccggccagcccctggt

SEQ ID NO: 4179 - RNA, 20 nt, synthetic construct
  source 1..20: mol_type = other RNA
cgcctggctcctattgtccc

SEQ ID NO: 4180 - RNA, 20 nt, synthetic construct
  source 1..20: mol_type = other RNA
cggccagcccctggtgagtc

SEQ ID NO: 4181 - RNA, 20 nt, synthetic construct
  source 1..20: mol_type = other RNA
cggcctggtgaccccaagtg

SEQ ID NO: 4182 - RNA, 20 nt, synthetic construct
  source 1..20: mol_type = other RNA
cggtgcgcctggctcctatt

SEQ ID NO: 4183 - RNA, 20 nt, synthetic construct
  source 1..20: mol_type = other RNA
ctattgtccctgcagagaaa

SEQ ID NO: 4184 - RNA, 20 nt, synthetic construct
  source 1..20: mol_type = other RNA
ctcaccaggggctggccggt

SEQ ID NO: 4185 - RNA, 20 nt, synthetic construct
  source 1..20: mol_type = other RNA
ctcactcttttcctgcatga

SEQ ID NO: 4186 - RNA, 20 nt, synthetic construct
  source 1..20: mol_type = other RNA
ctcctattgtccctgcagag

SEQ ID NO: 4187 - RNA, 20 nt, synthetic construct
  source 1..20: mol_type = other RNA
ctctgcagggacaataggag

SEQ ID NO: 4188 - RNA, 20 nt, synthetic construct
  source 1..20: mol_type = other RNA
ctcttttcctgcatgatcca

SEQ ID NO: 4189 - RNA, 20 nt, synthetic construct
  source 1..20: mol_type = other RNA
ctgcagagaaacacacttgg

SEQ ID NO: 4190 - RNA, 20 nt, synthetic construct
  source 1..20: mol_type = other RNA
ctgcagggacaataggagcc

SEQ ID NO: 4191 - RNA, 20 nt, synthetic construct
  source 1..20: mol_type = other RNA
ctggccggtgcgcctggctc

SEQ ID NO: 4192 - RNA, 20 nt, synthetic construct
  source 1..20: mol_type = other RNA
ctggctcctattgtccctgc

SEQ ID NO: 4193 - RNA, 20 nt, synthetic construct
  source 1..20: mol_type = other RNA
ctggtgaccccaagtgtgtt

SEQ ID NO: 4194 - RNA, 20 nt, synthetic construct
  source 1..20: mol_type = other RNA
ctggtgagtctcactctttt

SEQ ID NO: 4195 - RNA, 20 nt, synthetic construct
  source 1..20: mol_type = other RNA
gaaaagagtgagactcacca

SEQ ID NO: 4196 - RNA, 20 nt, synthetic construct
  source 1..20: mol_type = other RNA
gaaacacacttggggtcacc

SEQ ID NO: 4197 - RNA, 20 nt, synthetic construct
  source 1..20: mol_type = other RNA
gacaataggagccaggcgca

SEQ ID NO: 4198 - RNA, 20 nt, synthetic construct
  source 1..20: mol_type = other RNA
gaccccaagtgtgtttctct

SEQ ID NO: 4199 - RNA, 20 nt, synthetic construct
  source 1..20: mol_type = other RNA
gactcaccaggggctggccg

SEQ ID NO: 4200 - RNA, 20 nt, synthetic construct
  source 1..20: mol_type = other RNA
gagaaacacacttggggtca

SEQ ID NO: 4201 - RNA, 20 nt, synthetic construct
  source 1..20: mol_type = other RNA
gagactcaccaggggctggc

SEQ ID NO: 4202 - RNA, 20 nt, synthetic construct
  source 1..20: mol_type = other RNA
gagccaggcgcaccggccag

SEQ ID NO: 4203 - RNA, 20 nt, synthetic construct
  source 1..20: mol_type = other RNA
gagtctcactcttttcctgc

SEQ ID NO: 4204 - RNA, 20 nt, synthetic construct
  source 1..20: mol_type = other RNA
gagtgagactcaccaggggc

SEQ ID NO: 4205 - RNA, 20 nt, synthetic construct
  source 1..20: mol_type = other RNA
gatcatgcaggaaaagagtg

SEQ ID NO: 4206 - RNA, 20 nt, synthetic construct
  source 1..20: mol_type = other RNA
gcacagtggatcatgcagga

SEQ ID NO: 4207 - RNA, 20 nt, synthetic construct
  source 1..20: mol_type = other RNA
gcaccggccagcccctggtg

SEQ ID NO: 4208 - RNA, 20 nt, synthetic construct
  source 1..20: mol_type = other RNA
gcagagaaacacacttgggg

SEQ ID NO: 4209 - RNA, 20 nt, synthetic construct
  source 1..20: mol_type = other RNA
gcaggaaaagagtgagactc

SEQ ID NO: 4210 - RNA, 20 nt, synthetic construct
  source 1..20: mol_type = other RNA
gcagggacaataggagccag

SEQ ID NO: 4211 - RNA, 20 nt, synthetic construct
  source 1..20: mol_type = other RNA
gccagcccctggtgagtctc

SEQ ID NO: 4212 - RNA, 20 nt, synthetic construct
  source 1..20: mol_type = other RNA
gcccctggtgagtctcactc

SEQ ID NO: 4213 - RNA, 20 nt, synthetic construct
  source 1..20: mol_type = other RNA
gccggtgcgcctggctccta

SEQ ID NO: 4214 - RNA, 20 nt, synthetic construct
  source 1..20: mol_type = other RNA
gcctggctcctattgtccct

SEQ ID NO: 4215 - RNA, 20 nt, synthetic construct
  source 1..20: mol_type = other RNA
gcctggtgaccccaagtgtg

SEQ ID NO: 4216 - RNA, 20 nt, synthetic construct
  source 1..20: mol_type = other RNA
gcgcctggctcctattgtcc

SEQ ID NO: 4217 - RNA, 20 nt, synthetic construct
  source 1..20: mol_type = other RNA
gctcctattgtccctgcaga

SEQ ID NO: 4218 - RNA, 20 nt, synthetic construct
  source 1..20: mol_type = other RNA
gctggccggtgcgcctggct

SEQ ID NO: 4219 - RNA, 20 nt, synthetic construct
  source 1..20: mol_type = other RNA
ggaaaagagtgagactcacc

SEQ ID NO: 4220 - RNA, 20 nt, synthetic construct
  source 1..20: mol_type = other RNA
ggacaataggagccaggcgc

SEQ ID NO: 4221 - RNA, 20 nt, synthetic construct
  source 1..20: mol_type = other RNA
ggagccaggcgcaccggcca

SEQ ID NO: 4222 - RNA, 20 nt, synthetic construct
  source 1..20: mol_type = other RNA
ggatcatgcaggaaaagagt

SEQ ID NO: 4223 - RNA, 20 nt, synthetic construct
  source 1..20: mol_type = other RNA
ggcacagtggatcatgcagg

SEQ ID NO: 4224 - RNA, 20 nt, synthetic construct
  source 1..20: mol_type = other RNA
ggccagcccctggtgagtct

SEQ ID NO: 4225 - RNA, 20 nt, synthetic construct
  source 1..20: mol_type = other RNA
ggccggtgcgcctggctcct

SEQ ID NO: 4226 - RNA, 20 nt, synthetic construct
  source 1..20: mol_type = other RNA
ggcctggtgaccccaagtgt

SEQ ID NO: 4227 - RNA, 20 nt, synthetic construct
  source 1..20: mol_type = other RNA
ggctcctattgtccctgcag

SEQ ID NO: 4228 - RNA, 20 nt, synthetic construct
  source 1..20: mol_type = other RNA
gggacaataggagccaggcg

SEQ ID NO: 4229 - RNA, 20 nt, synthetic construct
  source 1..20: mol_type = other RNA
gggtcggcctggtgacccca

SEQ ID NO: 4230 - RNA, 20 nt, synthetic construct
  source 1..20: mol_type = other RNA
ggtcggcctggtgaccccaa

SEQ ID NO: 4231 - RNA, 20 nt, synthetic construct
  source 1..20: mol_type = other RNA
ggtgaccccaagtgtgtttc

SEQ ID NO: 4232 - RNA, 20 nt, synthetic construct
  source 1..20: mol_type = other RNA
ggtgagtctcactcttttcc

SEQ ID NO: 4233 - RNA, 20 nt, synthetic construct
  source 1..20: mol_type = other RNA
ggtgcgcctggctcctattg

SEQ ID NO: 4234 - RNA, 20 nt, synthetic construct
  source 1..20: mol_type = other RNA
gtccctgcagagaaacacac

SEQ ID NO: 4235 - RNA, 20 nt, synthetic construct
  source 1..20: mol_type = other RNA
gtcggcctggtgaccccaag

SEQ ID NO: 4236 - RNA, 20 nt, synthetic construct
  source 1..20: mol_type = other RNA
gtctcactcttttcctgcat

SEQ ID NO: 4237 - RNA, 20 nt, synthetic construct
  source 1..20: mol_type = other RNA
gtgaccccaagtgtgtttct

SEQ ID NO: 4238 - RNA, 20 nt, synthetic construct
  source 1..20: mol_type = other RNA
gtgagactcaccaggggctg

SEQ ID NO: 4239 - RNA, 20 nt, synthetic construct
  source 1..20: mol_type = other RNA
gtgagtctcactcttttcct

SEQ ID NO: 4240 - RNA, 20 nt, synthetic construct
  source 1..20: mol_type = other RNA
gtgcgcctggctcctattgt

SEQ ID NO: 4241 - RNA, 20 nt, synthetic construct
  source 1..20: mol_type = other RNA
gtggatcatgcaggaaaaga

SEQ ID NO: 4242 - RNA, 20 nt, synthetic construct
  source 1..20: mol_type = other RNA
gtgtgtttctctgcagggac

SEQ ID NO: 4243 - RNA, 20 nt, synthetic construct
  source 1..20: mol_type = other RNA
gtgtttctctgcagggacaa

SEQ ID NO: 4244 - RNA, 20 nt, synthetic construct
  source 1..20: mol_type = other RNA
gtttctctgcagggacaata

SEQ ID NO: 4245 - RNA, 20 nt, synthetic construct
  source 1..20: mol_type = other RNA
taggagccaggcgcaccggc

SEQ ID NO: 4246 - RNA, 20 nt, synthetic construct
  source 1..20: mol_type = other RNA
tattgtccctgcagagaaac

SEQ ID NO: 4247 - RNA, 20 nt, synthetic construct
  source 1..20: mol_type = other RNA
tcaccaggggctggccggtg

SEQ ID NO: 4248 - RNA, 20 nt, synthetic construct
  source 1..20: mol_type = other RNA
tcactcttttcctgcatgat

SEQ ID NO: 4249 - RNA, 20 nt, synthetic construct
  source 1..20: mol_type = other RNA
tcatgcaggaaaagagtgag

SEQ ID NO: 4250 - RNA, 20 nt, synthetic construct
  source 1..20: mol_type = other RNA
tccctgcagagaaacacact

SEQ ID NO: 4251 - RNA, 20 nt, synthetic construct
  source 1..20: mol_type = other RNA
tcctattgtccctgcagaga

SEQ ID NO: 4252 - RNA, 20 nt, synthetic construct
  source 1..20: mol_type = other RNA
tcggcctggtgaccccaagt

SEQ ID NO: 4253 - RNA, 20 nt, synthetic construct
  source 1..20: mol_type = other RNA
tctcactcttttcctgcatg

SEQ ID NO: 4254 - RNA, 20 nt, synthetic construct
  source 1..20: mol_type = other RNA
tctctgcagggacaatagga

SEQ ID NO: 4255 - RNA, 20 nt, synthetic construct
  source 1..20: mol_type = other RNA
tctgcagggacaataggagc

SEQ ID NO: 4256 - RNA, 20 nt, synthetic construct
  source 1..20: mol_type = other RNA
tcttttcctgcatgatccac

SEQ ID NO: 4257 - RNA, 20 nt, synthetic construct
  source 1..20: mol_type = other RNA
tgaccccaagtgtgtttctc

SEQ ID NO: 4258 - RNA, 20 nt, synthetic construct
  source 1..20: mol_type = other RNA
tgagactcaccaggggctgg

SEQ ID NO: 4259 - RNA, 20 nt, synthetic construct
  source 1..20: mol_type = other RNA
tgagtctcactcttttcctg

SEQ ID NO: 4260 - RNA, 20 nt, synthetic construct
  source 1..20: mol_type = other RNA
tgcagagaaacacacttggg

SEQ ID NO: 4261 - RNA, 20 nt, synthetic construct
  source 1..20: mol_type = other RNA
tgcaggaaaagagtgagact

SEQ ID NO: 4262 - RNA, 20 nt, synthetic construct
  source 1..20: mol_type = other RNA
tgcagggacaataggagcca

SEQ ID NO: 4263 - RNA, 20 nt, synthetic construct
  source 1..20: mol_type = other RNA
tgcgcctggctcctattgtc

SEQ ID NO: 4264 - RNA, 20 nt, synthetic construct
  source 1..20: mol_type = other RNA
tggatcatgcaggaaaagag

SEQ ID NO: 4265 - RNA, 20 nt, synthetic construct
  source 1..20: mol_type = other RNA
tggccggtgcgcctggctcc

SEQ ID NO: 4266 - RNA, 20 nt, synthetic construct
  source 1..20: mol_type = other RNA
tggctcctattgtccctgca

SEQ ID NO: 4267 - RNA, 20 nt, synthetic construct
  source 1..20: mol_type = other RNA
tggtgaccccaagtgtgttt

SEQ ID NO: 4268 - RNA, 20 nt, synthetic construct
  source 1..20: mol_type = other RNA
tggtgagtctcactcttttc

SEQ ID NO: 4269 - RNA, 20 nt, synthetic construct
  source 1..20: mol_type = other RNA
tgtccctgcagagaaacaca

SEQ ID NO: 4270 - RNA, 20 nt, synthetic construct
  source 1..20: mol_type = other RNA
tgtgtttctctgcagggaca

SEQ ID NO: 4271 - RNA, 20 nt, synthetic construct
  source 1..20: mol_type = other RNA
tgtttctctgcagggacaat

SEQ ID NO: 4272 - RNA, 20 nt, synthetic construct
  source 1..20: mol_type = other RNA
ttctctgcagggacaatagg

SEQ ID NO: 4273 - RNA, 20 nt, synthetic construct
  source 1..20: mol_type = other RNA
ttgtccctgcagagaaacac

SEQ ID NO: 4274 - RNA, 20 nt, synthetic construct
  source 1..20: mol_type = other RNA
tttctctgcagggacaatag

SEQ ID NO: 4275 - RNA, 21 nt, synthetic construct
  source 1..21: mol_type = other RNA
aaaagagtgagactcaccagg

SEQ ID NO: 4276 - RNA, 21 nt, synthetic construct
  source 1..21: mol_type = other RNA
aaacacacttggggtcaccag

SEQ ID NO: 4277 - RNA, 21 nt, synthetic construct
  source 1..21: mol_type = other RNA
aaagagtgagactcaccaggg

SEQ ID NO: 4278 - RNA, 21 nt, synthetic construct
  source 1..21: mol_type = other RNA
aacacacttggggtcaccagg

SEQ ID NO: 4279 - RNA, 21 nt, synthetic construct
  source 1..21: mol_type = other RNA
aagagtgagactcaccagggg

SEQ ID NO: 4280 - RNA, 21 nt, synthetic construct
  source 1..21: mol_type = other RNA
aaggcacagtggatcatgcag

SEQ ID NO: 4281 - RNA, 21 nt, synthetic construct
  source 1..21: mol_type = other RNA
aagtgtgtttctctgcaggga

SEQ ID NO: 4282 - RNA, 21 nt, synthetic construct
  source 1..21: mol_type = other RNA
aataggagccaggcgcaccgg

SEQ ID NO: 4283 - RNA, 21 nt, synthetic construct
  source 1..21: mol_type = other RNA
acaataggagccaggcgcacc

SEQ ID NO: 4284 - RNA, 21 nt, synthetic construct
  source 1..21: mol_type = other RNA
acagtggatcatgcaggaaaa

SEQ ID NO: 4285 - RNA, 21 nt, synthetic construct
  source 1..21: mol_type = other RNA
accccaagtgtgtttctctgc

SEQ ID NO: 4286 - RNA, 21 nt, synthetic construct
  source 1..21: mol_type = other RNA
accggccagcccctggtgagt

SEQ ID NO: 4287 - RNA, 21 nt, synthetic construct
  source 1..21: mol_type = other RNA
actcaccaggggctggccggt

SEQ ID NO: 4288 - RNA, 21 nt, synthetic construct
  source 1..21: mol_type = other RNA
actcttttcctgcatgatcca

SEQ ID NO: 4289 - RNA, 21 nt, synthetic construct
  source 1..21: mol_type = other RNA
agaaacacacttggggtcacc

SEQ ID NO: 4290 - RNA, 21 nt, synthetic construct
  source 1..21: mol_type = other RNA
agactcaccaggggctggccg

SEQ ID NO: 4291 - RNA, 21 nt, synthetic construct
  source 1..21: mol_type = other RNA
agagaaacacacttggggtca

SEQ ID NO: 4292 - RNA, 21 nt, synthetic construct
  source 1..21: mol_type = other RNA
agagtgagactcaccaggggc

SEQ ID NO: 4293 - RNA, 21 nt, synthetic construct
  source 1..21: mol_type = other RNA
agcccctggtgagtctcactc

SEQ ID NO: 4294 - RNA, 21 nt, synthetic construct
  source 1..21: mol_type = other RNA
aggaaaagagtgagactcacc

SEQ ID NO: 4295 - RNA, 21 nt, synthetic construct
  source 1..21: mol_type = other RNA
aggagccaggcgcaccggcca

SEQ ID NO: 4296 - RNA, 21 nt, synthetic construct
  source 1..21: mol_type = other RNA
aggcacagtggatcatgcagg

SEQ ID NO: 4297 - RNA, 21 nt, synthetic construct
  source 1..21: mol_type = other RNA
agggacaataggagccaggcg

SEQ ID NO: 4298 - RNA, 21 nt, synthetic construct
  source 1..21: mol_type = other RNA
agggtcggcctggtgacccca

SEQ ID NO: 4299 - RNA, 21 nt, synthetic construct
  source 1..21: mol_type = other RNA
agtctcactcttttcctgcat

SEQ ID NO: 4300 - RNA, 21 nt, synthetic construct
  source 1..21: mol_type = other RNA
agtgagactcaccaggggctg

SEQ ID NO: 4301 - RNA, 21 nt, synthetic construct
  source 1..21: mol_type = other RNA
agtggatcatgcaggaaaaga

SEQ ID NO: 4302 - RNA, 21 nt, synthetic construct
  source 1..21: mol_type = other RNA
agtgtgtttctctgcagggac

SEQ ID NO: 4303 - RNA, 21 nt, synthetic construct
  source 1..21: mol_type = other RNA
ataggagccaggcgcaccggc

SEQ ID NO: 4304 - RNA, 21 nt, synthetic construct
  source 1..21: mol_type = other RNA
atcatgcaggaaaagagtgag

SEQ ID NO: 4305 - RNA, 21 nt, synthetic construct
  source 1..21: mol_type = other RNA
atgcaggaaaagagtgagact

SEQ ID NO: 4306 - RNA, 21 nt, synthetic construct
  source 1..21: mol_type = other RNA
attgtccctgcagagaaacac

SEQ ID NO: 4307 - RNA, 21 nt, synthetic construct
  source 1..21: mol_type = other RNA
caagtgtgtttctctgcaggg

SEQ ID NO: 4308 - RNA, 21 nt, synthetic construct
  source 1..21: mol_type = other RNA
caataggagccaggcgcaccg

SEQ ID NO: 4309 - RNA, 21 nt, synthetic construct
  source 1..21: mol_type = other RNA
cacagtggatcatgcaggaaa

SEQ ID NO: 4310 - RNA, 21 nt, synthetic construct
  source 1..21: mol_type = other RNA
caccggccagcccctggtgag

SEQ ID NO: 4311 - RNA, 21 nt, synthetic construct
  source 1..21: mol_type = other RNA
cactcttttcctgcatgatcc

SEQ ID NO: 4312 - RNA, 21 nt, synthetic construct
  source 1..21: mol_type = other RNA
cagagaaacacacttggggtc

SEQ ID NO: 4313 - RNA, 21 nt, synthetic construct
  source 1..21: mol_type = other RNA
cagcccctggtgagtctcact

SEQ ID NO: 4314 - RNA, 21 nt, synthetic construct
  source 1..21: mol_type = other RNA
caggaaaagagtgagactcac

SEQ ID NO: 4315 - RNA, 21 nt, synthetic construct
  source 1..21: mol_type = other RNA
cagggacaataggagccaggc

SEQ ID NO: 4316 - RNA, 21 nt, synthetic construct
  source 1..21: mol_type = other RNA
cagtggatcatgcaggaaaag

SEQ ID NO: 4317 - RNA, 21 nt, synthetic construct
  source 1..21: mol_type = other RNA
catgcaggaaaagagtgagac

SEQ ID NO: 4318 - RNA, 21 nt, synthetic construct
  source 1..21: mol_type = other RNA
ccaagtgtgtttctctgcagg

SEQ ID NO: 4319 - RNA, 21 nt, synthetic construct
  source 1..21: mol_type = other RNA
ccagcccctggtgagtctcac

SEQ ID NO: 4320 - RNA, 21 nt, synthetic construct
  source 1..21: mol_type = other RNA
cccaagtgtgtttctctgcag

SEQ ID NO: 4321 - RNA, 21 nt, synthetic construct
  source 1..21: mol_type = other RNA
ccccaagtgtgtttctctgca

SEQ ID NO: 4322 - RNA, 21 nt, synthetic construct
  source 1..21: mol_type = other RNA
cccctggtgagtctcactctt

SEQ ID NO: 4323 - RNA, 21 nt, synthetic construct
  source 1..21: mol_type = other RNA
ccctgcagagaaacacacttg

SEQ ID NO: 4324 - RNA, 21 nt, synthetic construct
  source 1..21: mol_type = other RNA
ccctggtgagtctcactcttt

SEQ ID NO: 4325 - RNA, 21 nt, synthetic construct
  source 1..21: mol_type = other RNA
ccggccagcccctggtgagtc

SEQ ID NO: 4326 - RNA, 21 nt, synthetic construct
  source 1..21: mol_type = other RNA
ccggtgcgcctggctcctatt

SEQ ID NO: 4327 - RNA, 21 nt, synthetic construct
  source 1..21: mol_type = other RNA
cctattgtccctgcagagaaa

SEQ ID NO: 4328 - RNA, 21 nt, synthetic construct
  source 1..21: mol_type = other RNA
cctgcagagaaacacacttgg

SEQ ID NO: 4329 - RNA, 21 nt, synthetic construct
  source 1..21: mol_type = other RNA
cctggctcctattgtccctgc

SEQ ID NO: 4330 - RNA, 21 nt, synthetic construct
  source 1..21: mol_type = other RNA
cctggtgaccccaagtgtgtt

SEQ ID NO: 4331 - RNA, 21 nt, synthetic construct
  source 1..21: mol_type = other RNA
cctggtgagtctcactctttt

SEQ ID NO: 4332 - RNA, 21 nt, synthetic construct
  source 1..21: mol_type = other RNA
cgcctggctcctattgtccct

SEQ ID NO: 4333 - RNA, 21 nt, synthetic construct
  source 1..21: mol_type = other RNA
cggccagcccctggtgagtct

SEQ ID NO: 4334 - RNA, 21 nt, synthetic construct
  source 1..21: mol_type = other RNA
cggcctggtgaccccaagtgt

SEQ ID NO: 4335 - RNA, 21 nt, synthetic construct
  source 1..21: mol_type = other RNA
cggtgcgcctggctcctattg

SEQ ID NO: 4336 - RNA, 21 nt, synthetic construct
  source 1..21: mol_type = other RNA
ctattgtccctgcagagaaac

SEQ ID NO: 4337 - RNA, 21 nt, synthetic construct
  source 1..21: mol_type = other RNA
ctcaccaggggctggccggtg

SEQ ID NO: 4338 - RNA, 21 nt, synthetic construct
  source 1..21: mol_type = other RNA
ctcactcttttcctgcatgat

SEQ ID NO: 4339 - RNA, 21 nt, synthetic construct
  source 1..21: mol_type = other RNA
ctcctattgtccctgcagaga

SEQ ID NO: 4340 - RNA, 21 nt, synthetic construct
  source 1..21: mol_type = other RNA
ctctgcagggacaataggagc

SEQ ID NO: 4341 - RNA, 21 nt, synthetic construct
  source 1..21: mol_type = other RNA
ctcttttcctgcatgatccac

SEQ ID NO: 4342 - RNA, 21 nt, synthetic construct
  source 1..21: mol_type = other RNA
ctgcagagaaacacacttggg

SEQ ID NO: 4343 - RNA, 21 nt, synthetic construct
  source 1..21: mol_type = other RNA
ctgcagggacaataggagcca

SEQ ID NO: 4344 - RNA, 21 nt, synthetic construct
  source 1..21: mol_type = other RNA
ctggctcctattgtccctgca

SEQ ID NO: 4345 - RNA, 21 nt, synthetic construct
  source 1..21: mol_type = other RNA
ctggtgaccccaagtgtgttt

SEQ ID NO: 4346 - RNA, 21 nt, synthetic construct
  source 1..21: mol_type = other RNA
ctggtgagtctcactcttttc

SEQ ID NO: 4347 - RNA, 21 nt, synthetic construct
  source 1..21: mol_type = other RNA
gaaaagagtgagactcaccag

SEQ ID NO: 4348 - RNA, 21 nt, synthetic construct
  source 1..21: mol_type = other RNA
gaaacacacttggggtcacca

SEQ ID NO: 4349 - RNA, 21 nt, synthetic construct
  source 1..21: mol_type = other RNA
gacaataggagccaggcgcac

SEQ ID NO: 4350 - RNA, 21 nt, synthetic construct
  source 1..21: mol_type = other RNA
gaccccaagtgtgtttctctg

SEQ ID NO: 4351 - RNA, 21 nt, synthetic construct
  source 1..21: mol_type = other RNA
gactcaccaggggctggccgg

SEQ ID NO: 4352 - RNA, 21 nt, synthetic construct
  source 1..21: mol_type = other RNA
gagaaacacacttggggtcac

SEQ ID NO: 4353 - RNA, 21 nt, synthetic construct
  source 1..21: mol_type = other RNA
gagactcaccaggggctggcc

SEQ ID NO: 4354 - RNA, 21 nt, synthetic construct
  source 1..21: mol_type = other RNA
gagtctcactcttttcctgca

SEQ ID NO: 4355 - RNA, 21 nt, synthetic construct
  source 1..21: mol_type = other RNA
gagtgagactcaccaggggct

SEQ ID NO: 4356 - RNA, 21 nt, synthetic construct
  source 1..21: mol_type = other RNA
gatcatgcaggaaaagagtga

SEQ ID NO: 4357 - RNA, 21 nt, synthetic construct
  source 1..21: mol_type = other RNA
gcacagtggatcatgcaggaa

SEQ ID NO: 4358 - RNA, 21 nt, synthetic construct
  source 1..21: mol_type = other RNA
gcaccggccagcccctggtga

SEQ ID NO: 4359 - RNA, 21 nt, synthetic construct
  source 1..21: mol_type = other RNA
gcagagaaacacacttggggt

SEQ ID NO: 4360 - RNA, 21 nt, synthetic construct
  source 1..21: mol_type = other RNA
gcaggaaaagagtgagactca

SEQ ID NO: 4361 - RNA, 21 nt, synthetic construct
  source 1..21: mol_type = other RNA
gcagggacaataggagccagg

SEQ ID NO: 4362 - RNA, 21 nt, synthetic construct
  source 1..21: mol_type = other RNA
gccagcccctggtgagtctca

SEQ ID NO: 4363 - RNA, 21 nt, synthetic construct
  source 1..21: mol_type = other RNA
gcccctggtgagtctcactct

SEQ ID NO: 4364 - RNA, 21 nt, synthetic construct
  source 1..21: mol_type = other RNA
gccggtgcgcctggctcctat

SEQ ID NO: 4365 - RNA, 21 nt, synthetic construct
  source 1..21: mol_type = other RNA
gcctggctcctattgtccctg

SEQ ID NO: 4366 - RNA, 21 nt, synthetic construct
  source 1..21: mol_type = other RNA
gcctggtgaccccaagtgtgt

SEQ ID NO: 4367 - RNA, 21 nt, synthetic construct
  source 1..21: mol_type = other RNA
gcgcctggctcctattgtccc

SEQ ID NO: 4368 - RNA, 21 nt, synthetic construct
  source 1..21: mol_type = other RNA
gctcctattgtccctgcagag

SEQ ID NO: 4369 - RNA, 21 nt, synthetic construct
  source 1..21: mol_type = other RNA
ggaaaagagtgagactcacca

SEQ ID NO: 4370 - RNA, 21 nt, synthetic construct
  source 1..21: mol_type = other RNA
ggacaataggagccaggcgca

SEQ ID NO: 4371 - RNA, 21 nt, synthetic construct
  source 1..21: mol_type = other RNA
ggatcatgcaggaaaagagtg

SEQ ID NO: 4372 - RNA, 21 nt, synthetic construct
  source 1..21: mol_type = other RNA
ggcacagtggatcatgcagga

SEQ ID NO: 4373 - RNA, 21 nt, synthetic construct
  source 1..21: mol_type = other RNA
ggccagcccctggtgagtctc

SEQ ID NO: 4374 - RNA, 21 nt, synthetic construct
  source 1..21: mol_type = other RNA
ggccggtgcgcctggctccta

SEQ ID NO: 4375 - RNA, 21 nt, synthetic construct
  source 1..21: mol_type = other RNA
ggcctggtgaccccaagtgtg

SEQ ID NO: 4376 - RNA, 21 nt, synthetic construct
  source 1..21: mol_type = other RNA
ggctcctattgtccctgcaga

SEQ ID NO: 4377 - RNA, 21 nt, synthetic construct
  source 1..21: mol_type = other RNA
gggacaataggagccaggcgc

SEQ ID NO: 4378 - RNA, 21 nt, synthetic construct
  source 1..21: mol_type = other RNA
gggtcggcctggtgaccccaa

SEQ ID NO: 4379 - RNA, 21 nt, synthetic construct
  source 1..21: mol_type = other RNA
ggtcggcctggtgaccccaag

SEQ ID NO: 4380 - RNA, 21 nt, synthetic construct
  source 1..21: mol_type = other RNA
ggtgaccccaagtgtgtttct

SEQ ID NO: 4381 - RNA, 21 nt, synthetic construct
  source 1..21: mol_type = other RNA
ggtgagtctcactcttttcct

SEQ ID NO: 4382 - RNA, 21 nt, synthetic construct
  source 1..21: mol_type = other RNA
ggtgcgcctggctcctattgt

SEQ ID NO: 4383 - RNA, 21 nt, synthetic construct
  source 1..21: mol_type = other RNA
gtccctgcagagaaacacact

SEQ ID NO: 4384 - RNA, 21 nt, synthetic construct
  source 1..21: mol_type = other RNA
gtcggcctggtgaccccaagt

SEQ ID NO: 4385 - RNA, 21 nt, synthetic construct
  source 1..21: mol_type = other RNA
gtctcactcttttcctgcatg

SEQ ID NO: 4386 - RNA, 21 nt, synthetic construct
  source 1..21: mol_type = other RNA
gtgaccccaagtgtgtttctc

SEQ ID NO: 4387 - RNA, 21 nt, synthetic construct
  source 1..21: mol_type = other RNA
gtgagactcaccaggggctgg

SEQ ID NO: 4388 - RNA, 21 nt, synthetic construct
  source 1..21: mol_type = other RNA
gtgagtctcactcttttcctg

SEQ ID NO: 4389 - RNA, 21 nt, synthetic construct
  source 1..21: mol_type = other RNA
gtgcgcctggctcctattgtc

SEQ ID NO: 4390 - RNA, 21 nt, synthetic construct
  source 1..21: mol_type = other RNA
gtggatcatgcaggaaaagag

SEQ ID NO: 4391 - RNA, 21 nt, synthetic construct
  source 1..21: mol_type = other RNA
gtgtgtttctctgcagggaca

SEQ ID NO: 4392 - RNA, 21 nt, synthetic construct
  source 1..21: mol_type = other RNA
gtgtttctctgcagggacaat

SEQ ID NO: 4393 - RNA, 21 nt, synthetic construct
  source 1..21: mol_type = other RNA
gtttctctgcagggacaatag

SEQ ID NO: 4394 - RNA, 21 nt, synthetic construct
  source 1..21: mol_type = other RNA
taggagccaggcgcaccggcc

SEQ ID NO: 4395 - RNA, 21 nt, synthetic construct
  source 1..21: mol_type = other RNA
tattgtccctgcagagaaaca

SEQ ID NO: 4396 - RNA, 21 nt, synthetic construct
  source 1..21: mol_type = other RNA
tcaccaggggctggccggtgc

SEQ ID NO: 4397 - RNA, 21 nt, synthetic construct
  source 1..21: mol_type = other RNA
tcactcttttcctgcatgatc

SEQ ID NO: 4398 - RNA, 21 nt, synthetic construct
  source 1..21: mol_type = other RNA
tcatgcaggaaaagagtgaga

SEQ ID NO: 4399 - RNA, 21 nt, synthetic construct
  source 1..21: mol_type = other RNA
tccctgcagagaaacacactt

SEQ ID NO: 4400 - RNA, 21 nt, synthetic construct
  source 1..21: mol_type = other RNA
tcctattgtccctgcagagaa

SEQ ID NO: 4401 - RNA, 21 nt, synthetic construct
  source 1..21: mol_type = other RNA
tcggcctggtgaccccaagtg

SEQ ID NO: 4402 - RNA, 21 nt, synthetic construct
  source 1..21: mol_type = other RNA
tctcactcttttcctgcatga

SEQ ID NO: 4403 - RNA, 21 nt, synthetic construct
  source 1..21: mol_type = other RNA
tctctgcagggacaataggag

SEQ ID NO: 4404 - RNA, 21 nt, synthetic construct
  source 1..21: mol_type = other RNA
tctgcagggacaataggagcc

SEQ ID NO: 4405 - RNA, 21 nt, synthetic construct
  source 1..21: mol_type = other RNA
tgaccccaagtgtgtttctct

SEQ ID NO: 4406 - RNA, 21 nt, synthetic construct
  source 1..21: mol_type = other RNA
tgagactcaccaggggctggc

SEQ ID NO: 4407 - RNA, 21 nt, synthetic construct
  source 1..21: mol_type = other RNA
tgagtctcactcttttcctgc

SEQ ID NO: 4408 - RNA, 21 nt, synthetic construct
  source 1..21: mol_type = other RNA
tgcagagaaacacacttgggg

SEQ ID NO: 4409 - RNA, 21 nt, synthetic construct
  source 1..21: mol_type = other RNA
tgcaggaaaagagtgagactc

SEQ ID NO: 4410 - RNA, 21 nt, synthetic construct
  source 1..21: mol_type = other RNA
tgcagggacaataggagccag

SEQ ID NO: 4411 - RNA, 21 nt, synthetic construct
  source 1..21: mol_type = other RNA
tgcgcctggctcctattgtcc

SEQ ID NO: 4412 - RNA, 21 nt, synthetic construct
  source 1..21: mol_type = other RNA
tggatcatgcaggaaaagagt

SEQ ID NO: 4413 - RNA, 21 nt, synthetic construct
  source 1..21: mol_type = other RNA
tggccggtgcgcctggctcct

SEQ ID NO: 4414 - RNA, 21 nt, synthetic construct
  source 1..21: mol_type = other RNA
tggctcctattgtccctgcag

SEQ ID NO: 4415 - RNA, 21 nt, synthetic construct
  source 1..21: mol_type = other RNA
tggtgaccccaagtgtgtttc

SEQ ID NO: 4416 - RNA, 21 nt, synthetic construct
  source 1..21: mol_type = other RNA
tggtgagtctcactcttttcc

SEQ ID NO: 4417 - RNA, 21 nt, synthetic construct
  source 1..21: mol_type = other RNA
tgtccctgcagagaaacacac

SEQ ID NO: 4418 - RNA, 21 nt, synthetic construct
  source 1..21: mol_type = other RNA
tgtgtttctctgcagggacaa

SEQ ID NO: 4419 - RNA, 21 nt, synthetic construct
  source 1..21: mol_type = other RNA
tgtttctctgcagggacaata

SEQ ID NO: 4420 - RNA, 21 nt, synthetic construct
  source 1..21: mol_type = other RNA
ttctctgcagggacaatagga

SEQ ID NO: 4421 - RNA, 21 nt, synthetic construct
  source 1..21: mol_type = other RNA
ttgtccctgcagagaaacaca

SEQ ID NO: 4422 - RNA, 21 nt, synthetic construct
  source 1..21: mol_type = other RNA
tttctctgcagggacaatagg

SEQ ID NO: 4423 - RNA, 22 nt, synthetic construct
  source 1..22: mol_type = other RNA
aaaagagtgagactcaccaggg

SEQ ID NO: 4424 - RNA, 22 nt, synthetic construct
  source 1..22: mol_type = other RNA
aaacacacttggggtcaccagg

SEQ ID NO: 4425 - RNA, 22 nt, synthetic construct
  source 1..22: mol_type = other RNA
aaagagtgagactcaccagggg

SEQ ID NO: 4426 - RNA, 22 nt, synthetic construct
  source 1..22: mol_type = other RNA
aagagtgagactcaccaggggc

SEQ ID NO: 4427 - RNA, 22 nt, synthetic construct
  source 1..22: mol_type = other RNA
aaggcacagtggatcatgcagg

SEQ ID NO: 4428 - RNA, 22 nt, synthetic construct
  source 1..22: mol_type = other RNA
aagtgtgtttctctgcagggac

SEQ ID NO: 4429 - RNA, 22 nt, synthetic construct
  source 1..22: mol_type = other RNA
aataggagccaggcgcaccggc

SEQ ID NO: 4430 - RNA, 22 nt, synthetic construct
  source 1..22: mol_type = other RNA
acaataggagccaggcgcaccg

SEQ ID NO: 4431 - RNA, 22 nt, synthetic construct
  source 1..22: mol_type = other RNA
acagtggatcatgcaggaaaag

SEQ ID NO: 4432 - RNA, 22 nt, synthetic construct
  source 1..22: mol_type = other RNA
accccaagtgtgtttctctgca

SEQ ID NO: 4433 - RNA, 22 nt, synthetic construct
  source 1..22: mol_type = other RNA
accggccagcccctggtgagtc

SEQ ID NO: 4434 - RNA, 22 nt, synthetic construct
  source 1..22: mol_type = other RNA
actcaccaggggctggccggtg

SEQ ID NO: 4435 - RNA, 22 nt, synthetic construct
  source 1..22: mol_type = other RNA
actcttttcctgcatgatccac

SEQ ID NO: 4436 - RNA, 22 nt, synthetic construct
  source 1..22: mol_type = other RNA
agaaacacacttggggtcacca

SEQ ID NO: 4437 - RNA, 22 nt, synthetic construct
  source 1..22: mol_type = other RNA
agactcaccaggggctggccgg

SEQ ID NO: 4438 - RNA, 22 nt, synthetic construct
  source 1..22: mol_type = other RNA
agagaaacacacttggggtcac

SEQ ID NO: 4439 - RNA, 22 nt, synthetic construct
  source 1..22: mol_type = other RNA
agagtgagactcaccaggggct

SEQ ID NO: 4440 - RNA, 22 nt, synthetic construct
  source 1..22: mol_type = other RNA
agcccctggtgagtctcactct

SEQ ID NO: 4441 - RNA, 22 nt, synthetic construct
  source 1..22: mol_type = other RNA
aggaaaagagtgagactcacca

SEQ ID NO: 4442 - RNA, 22 nt, synthetic construct
  source 1..22: mol_type = other RNA
aggagccaggcgcaccggccag

SEQ ID NO: 4443 - RNA, 22 nt, synthetic construct
  source 1..22: mol_type = other RNA
aggcacagtggatcatgcagga

SEQ ID NO: 4444 - RNA, 22 nt, synthetic construct
  source 1..22: mol_type = other RNA
agggacaataggagccaggcgc

SEQ ID NO: 4445 - RNA, 22 nt, synthetic construct
  source 1..22: mol_type = other RNA
agggtcggcctggtgaccccaa

SEQ ID NO: 4446 - RNA, 22 nt, synthetic construct
  source 1..22: mol_type = other RNA
agtctcactcttttcctgcatg

SEQ ID NO: 4447 - RNA, 22 nt, synthetic construct
  source 1..22: mol_type = other RNA
agtgagactcaccaggggctgg

SEQ ID NO: 4448 - RNA, 22 nt, synthetic construct
  source 1..22: mol_type = other RNA
agtggatcatgcaggaaaagag

SEQ ID NO: 4449 - RNA, 22 nt, synthetic construct
  source 1..22: mol_type = other RNA
agtgtgtttctctgcagggaca

SEQ ID NO: 4450 - RNA, 22 nt, synthetic construct
  source 1..22: mol_type = other RNA
ataggagccaggcgcaccggcc

SEQ ID NO: 4451 - RNA, 22 nt, synthetic construct
  source 1..22: mol_type = other RNA
atcatgcaggaaaagagtgaga

SEQ ID NO: 4452 - RNA, 22 nt, synthetic construct
  source 1..22: mol_type = other RNA
atgcaggaaaagagtgagactc

SEQ ID NO: 4453 - RNA, 22 nt, synthetic construct
  source 1..22: mol_type = other RNA
attgtccctgcagagaaacaca

SEQ ID NO: 4454 - RNA, 22 nt, synthetic construct
  source 1..22: mol_type = other RNA
caagtgtgtttctctgcaggga

SEQ ID NO: 4455 - RNA, 22 nt, synthetic construct
  source 1..22: mol_type = other RNA
caataggagccaggcgcaccgg

SEQ ID NO: 4456 - RNA, 22 nt, synthetic construct
  source 1..22: mol_type = other RNA
cacagtggatcatgcaggaaaa

SEQ ID NO: 4457 - RNA, 22 nt, synthetic construct
  source 1..22: mol_type = other RNA
caccggccagcccctggtgagt

SEQ ID NO: 4458 - RNA, 22 nt, synthetic construct
  source 1..22: mol_type = other RNA
cactcttttcctgcatgatcca

SEQ ID NO: 4459 - RNA, 22 nt, synthetic construct
  source 1..22: mol_type = other RNA
cagagaaacacacttggggtca

SEQ ID NO: 4460 - RNA, 22 nt, synthetic construct
  source 1..22: mol_type = other RNA
cagcccctggtgagtctcactc

SEQ ID NO: 4461 - RNA, 22 nt, synthetic construct
  source 1..22: mol_type = other RNA
caggaaaagagtgagactcacc

SEQ ID NO: 4462 - RNA, 22 nt, synthetic construct
  source 1..22: mol_type = other RNA
cagggacaataggagccaggcg

SEQ ID NO: 4463 - RNA, 22 nt, synthetic construct
  source 1..22: mol_type = other RNA
cagtggatcatgcaggaaaaga

SEQ ID NO: 4464 - RNA, 22 nt, synthetic construct
  source 1..22: mol_type = other RNA
catgcaggaaaagagtgagact

SEQ ID NO: 4465 - RNA, 22 nt, synthetic construct
  source 1..22: mol_type = other RNA
ccaagtgtgtttctctgcaggg

SEQ ID NO: 4466 - RNA, 22 nt, synthetic construct
  source 1..22: mol_type = other RNA
ccagcccctggtgagtctcact

SEQ ID NO: 4467 - RNA, 22 nt, synthetic construct
  source 1..22: mol_type = other RNA
cccaagtgtgtttctctgcagg

SEQ ID NO: 4468 - RNA, 22 nt, synthetic construct
  source 1..22: mol_type = other RNA
ccccaagtgtgtttctctgcag

SEQ ID NO: 4469 - RNA, 22 nt, synthetic construct
  source 1..22: mol_type = other RNA
cccctggtgagtctcactcttt

SEQ ID NO: 4470 - RNA, 22 nt, synthetic construct
  source 1..22: mol_type = other RNA
ccctgcagagaaacacacttgg

SEQ ID NO: 4471 - RNA, 22 nt, synthetic construct
  source 1..22: mol_type = other RNA
ccctggtgagtctcactctttt

SEQ ID NO: 4472 - RNA, 22 nt, synthetic construct
  source 1..22: mol_type = other RNA
ccggccagcccctggtgagtct

SEQ ID NO: 4473 - RNA, 22 nt, synthetic construct
  source 1..22: mol_type = other RNA
ccggtgcgcctggctcctattg

SEQ ID NO: 4474 - RNA, 22 nt, synthetic construct
  source 1..22: mol_type = other RNA
cctattgtccctgcagagaaac

SEQ ID NO: 4475 - RNA, 22 nt, synthetic construct
  source 1..22: mol_type = other RNA
cctgcagagaaacacacttggg

SEQ ID NO: 4476 - RNA, 22 nt, synthetic construct
  source 1..22: mol_type = other RNA
cctggctcctattgtccctgca

SEQ ID NO: 4477 - RNA, 22 nt, synthetic construct
  source 1..22: mol_type = other RNA
cctggtgaccccaagtgtgttt

SEQ ID NO: 4478 - RNA, 22 nt, synthetic construct
  source 1..22: mol_type = other RNA
cctggtgagtctcactcttttc

SEQ ID NO: 4479 - RNA, 22 nt, synthetic construct
  source 1..22: mol_type = other RNA
cgcaccggccagcccctggtga

SEQ ID NO: 4480 - RNA, 22 nt, synthetic construct
  source 1..22: mol_type = other RNA
cgcctggctcctattgtccctg

SEQ ID NO: 4481 - RNA, 22 nt, synthetic construct
  source 1..22: mol_type = other RNA
cggccagcccctggtgagtctc

SEQ ID NO: 4482 - RNA, 22 nt, synthetic construct
  source 1..22: mol_type = other RNA
cggcctggtgaccccaagtgtg

SEQ ID NO: 4483 - RNA, 22 nt, synthetic construct
  source 1..22: mol_type = other RNA
cggtgcgcctggctcctattgt

SEQ ID NO: 4484 - RNA, 22 nt, synthetic construct
  source 1..22: mol_type = other RNA
ctattgtccctgcagagaaaca

SEQ ID NO: 4485 - RNA, 22 nt, synthetic construct
  source 1..22: mol_type = other RNA
ctcaccaggggctggccggtgc

SEQ ID NO: 4486 - RNA, 22 nt, synthetic construct
  source 1..22: mol_type = other RNA
ctcactcttttcctgcatgatc

SEQ ID NO: 4487 - RNA, 22 nt, synthetic construct
  source 1..22: mol_type = other RNA
ctcctattgtccctgcagagaa

SEQ ID NO: 4488 - RNA, 22 nt, synthetic construct
  source 1..22: mol_type = other RNA
ctctgcagggacaataggagcc

SEQ ID NO: 4489 - RNA, 22 nt, synthetic construct
  source 1..22: mol_type = other RNA
ctgcagagaaacacacttgggg

SEQ ID NO: 4490 - RNA, 22 nt, synthetic construct
  source 1..22: mol_type = other RNA
ctgcagggacaataggagccag

SEQ ID NO: 4491 - RNA, 22 nt, synthetic construct
  source 1..22: mol_type = other RNA
ctggccggtgcgcctggctcct

SEQ ID NO: 4492 - RNA, 22 nt, synthetic construct
  source 1..22: mol_type = other RNA
ctggctcctattgtccctgcag

SEQ ID NO: 4493 - RNA, 22 nt, synthetic construct
  source 1..22: mol_type = other RNA
ctggtgaccccaagtgtgtttc

SEQ ID NO: 4494 - RNA, 22 nt, synthetic construct
  source 1..22: mol_type = other RNA
ctggtgagtctcactcttttcc

SEQ ID NO: 4495 - RNA, 22 nt, synthetic construct
  source 1..22: mol_type = other RNA
gaaaagagtgagactcaccagg

SEQ ID NO: 4496 - RNA, 22 nt, synthetic construct
  source 1..22: mol_type = other RNA
gaaacacacttggggtcaccag

SEQ ID NO: 4497 - RNA, 22 nt, synthetic construct
  source 1..22: mol_type = other RNA
gacaataggagccaggcgcacc

SEQ ID NO: 4498 - RNA, 22 nt, synthetic construct
  source 1..22: mol_type = other RNA
gaccccaagtgtgtttctctgc

SEQ ID NO: 4499 - RNA, 22 nt, synthetic construct
  source 1..22: mol_type = other RNA
gactcaccaggggctggccggt

SEQ ID NO: 4500 - RNA, 22 nt, synthetic construct
  source 1..22: mol_type = other RNA
gagaaacacacttggggtcacc

SEQ ID NO: 4501 - RNA, 22 nt, synthetic construct
  source 1..22: mol_type = other RNA
gagactcaccaggggctggccg

SEQ ID NO: 4502 - RNA, 22 nt, synthetic construct
  source 1..22: mol_type = other RNA
gagtctcactcttttcctgcat

SEQ ID NO: 4503 - RNA, 22 nt, synthetic construct
  source 1..22: mol_type = other RNA
gagtgagactcaccaggggctg

SEQ ID NO: 4504 - RNA, 22 nt, synthetic construct
  source 1..22: mol_type = other RNA
gatcatgcaggaaaagagtgag

SEQ ID NO: 4505 - RNA, 22 nt, synthetic construct
  source 1..22: mol_type = other RNA
gcacagtggatcatgcaggaaa

SEQ ID NO: 4506 - RNA, 22 nt, synthetic construct
  source 1..22: mol_type = other RNA
gcaccggccagcccctggtgag

SEQ ID NO: 4507 - RNA, 22 nt, synthetic construct
  source 1..22: mol_type = other RNA
gcagagaaacacacttggggtc

SEQ ID NO: 4508 - RNA, 22 nt, synthetic construct
  source 1..22: mol_type = other RNA
gcaggaaaagagtgagactcac

SEQ ID NO: 4509 - RNA, 22 nt, synthetic construct
  source 1..22: mol_type = other RNA
gcagggacaataggagccaggc

SEQ ID NO: 4510 - RNA, 22 nt, synthetic construct
  source 1..22: mol_type = other RNA
gccagcccctggtgagtctcac

SEQ ID NO: 4511 - RNA, 22 nt, synthetic construct
  source 1..22: mol_type = other RNA
gcccctggtgagtctcactctt

SEQ ID NO: 4512 - RNA, 22 nt, synthetic construct
  source 1..22: mol_type = other RNA
gccggtgcgcctggctcctatt

SEQ ID NO: 4513 - RNA, 22 nt, synthetic construct
  source 1..22: mol_type = other RNA
gcctggctcctattgtccctgc

SEQ ID NO: 4514 - RNA, 22 nt, synthetic construct
  source 1..22: mol_type = other RNA
gcctggtgaccccaagtgtgtt

SEQ ID NO: 4515 - RNA, 22 nt, synthetic construct
  source 1..22: mol_type = other RNA
gcgcctggctcctattgtccct

SEQ ID NO: 4516 - RNA, 22 nt, synthetic construct
  source 1..22: mol_type = other RNA
gctcctattgtccctgcagaga

SEQ ID NO: 4517 - RNA, 22 nt, synthetic construct
  source 1..22: mol_type = other RNA
ggaaaagagtgagactcaccag

SEQ ID NO: 4518 - RNA, 22 nt, synthetic construct
  source 1..22: mol_type = other RNA
ggacaataggagccaggcgcac

SEQ ID NO: 4519 - RNA, 22 nt, synthetic construct
  source 1..22: mol_type = other RNA
ggatcatgcaggaaaagagtga

SEQ ID NO: 4520 - RNA, 22 nt, synthetic construct
  source 1..22: mol_type = other RNA
ggcacagtggatcatgcaggaa

SEQ ID NO: 4521 - RNA, 22 nt, synthetic construct
  source 1..22: mol_type = other RNA
ggccagcccctggtgagtctca

SEQ ID NO: 4522 - RNA, 22 nt, synthetic construct
  source 1..22: mol_type = other RNA
ggccggtgcgcctggctcctat

SEQ ID NO: 4523 - RNA, 22 nt, synthetic construct
  source 1..22: mol_type = other RNA
ggcctggtgaccccaagtgtgt

SEQ ID NO: 4524 - RNA, 22 nt, synthetic construct
  source 1..22: mol_type = other RNA
ggctcctattgtccctgcagag

SEQ ID NO: 4525 - RNA, 22 nt, synthetic construct
  source 1..22: mol_type = other RNA
gggacaataggagccaggcgca

SEQ ID NO: 4526 - RNA, 22 nt, synthetic construct
  source 1..22: mol_type = other RNA
gggtcggcctggtgaccccaag

SEQ ID NO: 4527 - RNA, 22 nt, synthetic construct
  source 1..22: mol_type = other RNA
ggtcggcctggtgaccccaagt

SEQ ID NO: 4528 - RNA, 22 nt, synthetic construct
  source 1..22: mol_type = other RNA
ggtgaccccaagtgtgtttctc

SEQ ID NO: 4529 - RNA, 22 nt, synthetic construct
  source 1..22: mol_type = other RNA
ggtgagtctcactcttttcctg

SEQ ID NO: 4530 - RNA, 22 nt, synthetic construct
  source 1..22: mol_type = other RNA
ggtgcgcctggctcctattgtc

SEQ ID NO: 4531 - RNA, 22 nt, synthetic construct
  source 1..22: mol_type = other RNA
gtccctgcagagaaacacactt

SEQ ID NO: 4532 - RNA, 22 nt, synthetic construct
  source 1..22: mol_type = other RNA
gtcggcctggtgaccccaagtg

SEQ ID NO: 4533 - RNA, 22 nt, synthetic construct
  source 1..22: mol_type = other RNA
gtctcactcttttcctgcatga

SEQ ID NO: 4534 - RNA, 22 nt, synthetic construct
  source 1..22: mol_type = other RNA
gtgaccccaagtgtgtttctct

SEQ ID NO: 4535 - RNA, 22 nt, synthetic construct
  source 1..22: mol_type = other RNA
gtgagactcaccaggggctggc

SEQ ID NO: 4536 - RNA, 22 nt, synthetic construct
  source 1..22: mol_type = other RNA
gtgagtctcactcttttcctgc

SEQ ID NO: 4537 - RNA, 22 nt, synthetic construct
  source 1..22: mol_type = other RNA
gtgcgcctggctcctattgtcc

SEQ ID NO: 4538 - RNA, 22 nt, synthetic construct
  source 1..22: mol_type = other RNA
gtggatcatgcaggaaaagagt

SEQ ID NO: 4539 - RNA, 22 nt, synthetic construct
  source 1..22: mol_type = other RNA
gtgtgtttctctgcagggacaa

SEQ ID NO: 4540 - RNA, 22 nt, synthetic construct
  source 1..22: mol_type = other RNA
gtgtttctctgcagggacaata

SEQ ID NO: 4541 - RNA, 22 nt, synthetic construct
  source 1..22: mol_type = other RNA
gtttctctgcagggacaatagg

SEQ ID NO: 4542 - RNA, 22 nt, synthetic construct
  source 1..22: mol_type = other RNA
taggagccaggcgcaccggcca

SEQ ID NO: 4543 - RNA, 22 nt, synthetic construct
  source 1..22: mol_type = other RNA
tattgtccctgcagagaaacac

SEQ ID NO: 4544 - RNA, 22 nt, synthetic construct
  source 1..22: mol_type = other RNA
tcaccaggggctggccggtgcg

SEQ ID NO: 4545 - RNA, 22 nt, synthetic construct
  source 1..22: mol_type = other RNA
tcactcttttcctgcatgatcc

SEQ ID NO: 4546 - RNA, 22 nt, synthetic construct
  source 1..22: mol_type = other RNA
tcatgcaggaaaagagtgagac

SEQ ID NO: 4547 - RNA, 22 nt, synthetic construct
  source 1..22: mol_type = other RNA
tccctgcagagaaacacacttg

SEQ ID NO: 4548 - RNA, 22 nt, synthetic construct
  source 1..22: mol_type = other RNA
tcctattgtccctgcagagaaa

SEQ ID NO: 4549 - RNA, 22 nt, synthetic construct
  source 1..22: mol_type = other RNA
tcggcctggtgaccccaagtgt

SEQ ID NO: 4550 - RNA, 22 nt, synthetic construct
  source 1..22: mol_type = other RNA
tctcactcttttcctgcatgat

SEQ ID NO: 4551 - RNA, 22 nt, synthetic construct
  source 1..22: mol_type = other RNA
tctctgcagggacaataggagc

SEQ ID NO: 4552 - RNA, 22 nt, synthetic construct
  source 1..22: mol_type = other RNA
tctgcagggacaataggagcca

SEQ ID NO: 4553 - RNA, 22 nt, synthetic construct
  source 1..22: mol_type = other RNA
tgaccccaagtgtgtttctctg

SEQ ID NO: 4554 - RNA, 22 nt, synthetic construct
  source 1..22: mol_type = other RNA
tgagactcaccaggggctggcc

SEQ ID NO: 4555 - RNA, 22 nt, synthetic construct
  source 1..22: mol_type = other RNA
tgagtctcactcttttcctgca

SEQ ID NO: 4556 - RNA, 22 nt, synthetic construct
  source 1..22: mol_type = other RNA
tgcagagaaacacacttggggt

SEQ ID NO: 4557 - RNA, 22 nt, synthetic construct
  source 1..22: mol_type = other RNA
tgcaggaaaagagtgagactca

SEQ ID NO: 4558 - RNA, 22 nt, synthetic construct
  source 1..22: mol_type = other RNA
tgcagggacaataggagccagg

SEQ ID NO: 4559 - RNA, 22 nt, synthetic construct
  source 1..22: mol_type = other RNA
tgcgcctggctcctattgtccc

SEQ ID NO: 4560 - RNA, 22 nt, synthetic construct
  source 1..22: mol_type = other RNA
tggatcatgcaggaaaagagtg

SEQ ID NO: 4561 - RNA, 22 nt, synthetic construct
  source 1..22: mol_type = other RNA
tggccggtgcgcctggctccta

SEQ ID NO: 4562 - RNA, 22 nt, synthetic construct
  source 1..22: mol_type = other RNA
tggctcctattgtccctgcaga

SEQ ID NO: 4563 - RNA, 22 nt, synthetic construct
  source 1..22: mol_type = other RNA
tggtgaccccaagtgtgtttct

SEQ ID NO: 4564 - RNA, 22 nt, synthetic construct
  source 1..22: mol_type = other RNA
tggtgagtctcactcttttcct

SEQ ID NO: 4565 - RNA, 22 nt, synthetic construct
  source 1..22: mol_type = other RNA
tgtccctgcagagaaacacact

SEQ ID NO: 4566 - RNA, 22 nt, synthetic construct
  source 1..22: mol_type = other RNA
tgtgtttctctgcagggacaat

SEQ ID NO: 4567 - RNA, 22 nt, synthetic construct
  source 1..22: mol_type = other RNA
tgtttctctgcagggacaatag

SEQ ID NO: 4568 - RNA, 22 nt, synthetic construct
  source 1..22: mol_type = other RNA
ttctctgcagggacaataggag

SEQ ID NO: 4569 - RNA, 22 nt, synthetic construct
  source 1..22: mol_type = other RNA
ttgtccctgcagagaaacacac

SEQ ID NO: 4570 - RNA, 22 nt, synthetic construct
  source 1..22: mol_type = other RNA
tttctctgcagggacaatagga

SEQ ID NO: 4571 - RNA, 20 nt, synthetic construct
  source 1..20: mol_type = other RNA
aaagaaggaggacccctcag

SEQ ID NO: 4572 - RNA, 20 nt, synthetic construct
  source 1..20: mol_type = other RNA
aaagacaatggtggcatact

SEQ ID NO: 4573 - RNA, 20 nt, synthetic construct
  source 1..20: mol_type = other RNA
aaagggagagggagtcagcc

SEQ ID NO: 4574 - RNA, 20 nt, synthetic construct
  source 1..20: mol_type = other RNA
aaatccagctccccatagtc

SEQ ID NO: 4575 - RNA, 20 nt, synthetic construct
  source 1..20: mol_type = other RNA
aacacaggcacggctgaggg

SEQ ID NO: 4576 - RNA, 20 nt, synthetic construct
  source 1..20: mol_type = other RNA
aacactggtggccaaggaag

SEQ ID NO: 4577 - RNA, 20 nt, synthetic construct
  source 1..20: mol_type = other RNA
aagaaggaggacccctcagc

SEQ ID NO: 4578 - RNA, 20 nt, synthetic construct
  source 1..20: mol_type = other RNA
aagacaatggtggcatactc

SEQ ID NO: 4579 - RNA, 20 nt, synthetic construct
  source 1..20: mol_type = other RNA
aagaccccggagccccccgt

SEQ ID NO: 4580 - RNA, 20 nt, synthetic construct
  source 1..20: mol_type = other RNA
aagagcagtgtccatcctca

SEQ ID NO: 4581 - RNA, 20 nt, synthetic construct
  source 1..20: mol_type = other RNA
aagccggtcagaggggccaa

SEQ ID NO: 4582 - RNA, 20 nt, synthetic construct
  source 1..20: mol_type = other RNA
aaggaagccggtcagagggg

SEQ ID NO: 4583 - RNA, 20 nt, synthetic construct
  source 1..20: mol_type = other RNA
aaggaggacccctcagccgt

SEQ ID NO: 4584 - RNA, 20 nt, synthetic construct
  source 1..20: mol_type = other RNA
aatccagctccccatagtcc

SEQ ID NO: 4585 - RNA, 20 nt, synthetic construct
  source 1..20: mol_type = other RNA
aatgggcacctcatcccccg

SEQ ID NO: 4586 - RNA, 20 nt, synthetic construct
  source 1..20: mol_type = other RNA
aatggtggcatactccgtct

SEQ ID NO: 4587 - RNA, 20 nt, synthetic construct
  source 1..20: mol_type = other RNA
acaatggtggcatactccgt

SEQ ID NO: 4588 - RNA, 20 nt, synthetic construct
  source 1..20: mol_type = other RNA
acacaggcacggctgagggg

SEQ ID NO: 4589 - RNA, 20 nt, synthetic construct
  source 1..20: mol_type = other RNA
acacagggcacggggggctc

SEQ ID NO: 4590 - RNA, 20 nt, synthetic construct
  source 1..20: mol_type = other RNA
acactgctcttggcccctct

SEQ ID NO: 4591 - RNA, 20 nt, synthetic construct
  source 1..20: mol_type = other RNA
acactggtggccaaggaagc

SEQ ID NO: 4592 - RNA, 20 nt, synthetic construct
  source 1..20: mol_type = other RNA
acagagaacacaggcacggc

SEQ ID NO: 4593 - RNA, 20 nt, synthetic construct
  source 1..20: mol_type = other RNA
acaggcacggctgaggggtc

SEQ ID NO: 4594 - RNA, 20 nt, synthetic construct
  source 1..20: mol_type = other RNA
acagggcacggggggctccg

SEQ ID NO: 4595 - RNA, 20 nt, synthetic construct
  source 1..20: mol_type = other RNA
accattgtctttcctagcgg

SEQ ID NO: 4596 - RNA, 20 nt, synthetic construct
  source 1..20: mol_type = other RNA
acccctcagccgtgcctgtg

SEQ ID NO: 4597 - RNA, 20 nt, synthetic construct
  source 1..20: mol_type = other RNA
accggcttccttggccacca

SEQ ID NO: 4598 - RNA, 20 nt, synthetic construct
  source 1..20: mol_type = other RNA
acctcatcccccgcccgcag

SEQ ID NO: 4599 - RNA, 20 nt, synthetic construct
  source 1..20: mol_type = other RNA
acggagtatgccaccattgt

SEQ ID NO: 4600 - RNA, 20 nt, synthetic construct
  source 1..20: mol_type = other RNA
acggccctcggagtgcccag

SEQ ID NO: 4601 - RNA, 20 nt, synthetic construct
  source 1..20: mol_type = other RNA
acggctgaggggtcctcctt

SEQ ID NO: 4602 - RNA, 20 nt, synthetic construct
  source 1..20: mol_type = other RNA
acggggggctccggggtctt

SEQ ID NO: 4603 - RNA, 20 nt, synthetic construct
  source 1..20: mol_type = other RNA
actatggggagctggatttc

SEQ ID NO: 4604 - RNA, 20 nt, synthetic construct
  source 1..20: mol_type = other RNA
actccctctccctttctcct

SEQ ID NO: 4605 - RNA, 20 nt, synthetic construct
  source 1..20: mol_type = other RNA
actccgagggccgtcagctg

SEQ ID NO: 4606 - RNA, 20 nt, synthetic construct
  source 1..20: mol_type = other RNA
actccgtctgctcagggaca

SEQ ID NO: 4607 - RNA, 20 nt, synthetic construct
  source 1..20: mol_type = other RNA
actgaggcctgaggatggac

SEQ ID NO: 4608 - RNA, 20 nt, synthetic construct
  source 1..20: mol_type = other RNA
actgctcttggcccctctga

SEQ ID NO: 4609 - RNA, 20 nt, synthetic construct
  source 1..20: mol_type = other RNA
actggaaatccagctcccca

SEQ ID NO: 4610 - RNA, 20 nt, synthetic construct
  source 1..20: mol_type = other RNA
actggtggccaaggaagccg

SEQ ID NO: 4611 - RNA, 20 nt, synthetic construct
  source 1..20: mol_type = other RNA
agaaagggagagggagtcag

SEQ ID NO: 4612 - RNA, 20 nt, synthetic construct
  source 1..20: mol_type = other RNA
agaacacaggcacggctgag

SEQ ID NO: 4613 - RNA, 20 nt, synthetic construct
  source 1..20: mol_type = other RNA
agaacactggtggccaagga

SEQ ID NO: 4614 - RNA, 20 nt, synthetic construct
  source 1..20: mol_type = other RNA
agaagaccccggagcccccc

SEQ ID NO: 4615 - RNA, 20 nt, synthetic construct
  source 1..20: mol_type = other RNA
agaaggaggacccctcagcc

SEQ ID NO: 4616 - RNA, 20 nt, synthetic construct
  source 1..20: mol_type = other RNA
agacaatggtggcatactcc

SEQ ID NO: 4617 - RNA, 20 nt, synthetic construct
  source 1..20: mol_type = other RNA
agaccccggagccccccgtg

SEQ ID NO: 4618 - RNA, 20 nt, synthetic construct
  source 1..20: mol_type = other RNA
agacggagtatgccaccatt

SEQ ID NO: 4619 - RNA, 20 nt, synthetic construct
  source 1..20: mol_type = other RNA
agagaacacaggcacggctg

SEQ ID NO: 4620 - RNA, 20 nt, synthetic construct
  source 1..20: mol_type = other RNA
agagaagaccccggagcccc

SEQ ID NO: 4621 - RNA, 20 nt, synthetic construct
  source 1..20: mol_type = other RNA
agagcagtgtccatcctcag

SEQ ID NO: 4622 - RNA, 20 nt, synthetic construct
  source 1..20: mol_type = other RNA
agaggggccaagagcagtgt

SEQ ID NO: 4623 - RNA, 20 nt, synthetic construct
  source 1..20: mol_type = other RNA
agcagacggagtatgccacc

SEQ ID NO: 4624 - RNA, 20 nt, synthetic construct
  source 1..20: mol_type = other RNA
agcagtgtccatcctcaggc

SEQ ID NO: 4625 - RNA, 20 nt, synthetic construct
  source 1..20: mol_type = other RNA
agccactgaggcctgaggat

SEQ ID NO: 4626 - RNA, 20 nt, synthetic construct
  source 1..20: mol_type = other RNA
agccccccgtgccctgtgtc

SEQ ID NO: 4627 - RNA, 20 nt, synthetic construct
  source 1..20: mol_type = other RNA
agcccctgcgggcgggggat

SEQ ID NO: 4628 - RNA, 20 nt, synthetic construct
  source 1..20: mol_type = other RNA
agccggtcagaggggccaag

SEQ ID NO: 4629 - RNA, 20 nt, synthetic construct
  source 1..20: mol_type = other RNA
agccgtgcctgtgttctctg

SEQ ID NO: 4630 - RNA, 20 nt, synthetic construct
  source 1..20: mol_type = other RNA
agcggaatgggcacctcatc

SEQ ID NO: 4631 - RNA, 20 nt, synthetic construct
  source 1..20: mol_type = other RNA
agctccccatagtccacaga

SEQ ID NO: 4632 - RNA, 20 nt, synthetic construct
  source 1..20: mol_type = other RNA
agctgacggccctcggagtg

SEQ ID NO: 4633 - RNA, 20 nt, synthetic construct
  source 1..20: mol_type = other RNA
agctgagcccctgcgggcgg

SEQ ID NO: 4634 - RNA, 20 nt, synthetic construct
  source 1..20: mol_type = other RNA
agctggatttccagtggcga

SEQ ID NO: 4635 - RNA, 20 nt, synthetic construct
  source 1..20: mol_type = other RNA
aggaaagacaatggtggcat

SEQ ID NO: 4636 - RNA, 20 nt, synthetic construct
  source 1..20: mol_type = other RNA
aggaagccggtcagaggggc

SEQ ID NO: 4637 - RNA, 20 nt, synthetic construct
  source 1..20: mol_type = other RNA
aggacccctcagccgtgcct

SEQ ID NO: 4638 - RNA, 20 nt, synthetic construct
  source 1..20: mol_type = other RNA
aggagaaagggagagggagt

SEQ ID NO: 4639 - RNA, 20 nt, synthetic construct
  source 1..20: mol_type = other RNA
aggaggacccctcagccgtg

SEQ ID NO: 4640 - RNA, 20 nt, synthetic construct
  source 1..20: mol_type = other RNA
aggatggacactgctcttgg

SEQ ID NO: 4641 - RNA, 20 nt, synthetic construct
  source 1..20: mol_type = other RNA
aggcacggctgaggggtcct

SEQ ID NO: 4642 - RNA, 20 nt, synthetic construct
  source 1..20: mol_type = other RNA
aggcctcagtggctgggcac

SEQ ID NO: 4643 - RNA, 20 nt, synthetic construct
  source 1..20: mol_type = other RNA
aggcctgaggatggacactg

SEQ ID NO: 4644 - RNA, 20 nt, synthetic construct
  source 1..20: mol_type = other RNA
agggacacagggcacggggg

SEQ ID NO: 4645 - RNA, 20 nt, synthetic construct
  source 1..20: mol_type = other RNA
agggccgtcagctgagcccc

SEQ ID NO: 4646 - RNA, 20 nt, synthetic construct
  source 1..20: mol_type = other RNA
aggggccaagagcagtgtcc

SEQ ID NO: 4647 - RNA, 20 nt, synthetic construct
  source 1..20: mol_type = other RNA
aggggctcagctgacggccc

SEQ ID NO: 4648 - RNA, 20 nt, synthetic construct
  source 1..20: mol_type = other RNA
aggggtcctccttctttgag

SEQ ID NO: 4649 - RNA, 20 nt, synthetic construct
  source 1..20: mol_type = other RNA
agggtctgcagaacactggt

SEQ ID NO: 4650 - RNA, 20 nt, synthetic construct
  source 1..20: mol_type = other RNA
aggtgcccattccgctagga

SEQ ID NO: 4651 - RNA, 20 nt, synthetic construct
  source 1..20: mol_type = other RNA
agtatgccaccattgtcttt

SEQ ID NO: 4652 - RNA, 20 nt, synthetic construct
  source 1..20: mol_type = other RNA
agtccacagagaacacaggc

SEQ ID NO: 4653 - RNA, 20 nt, synthetic construct
  source 1..20: mol_type = other RNA
agtgcccagccactgaggcc

SEQ ID NO: 4654 - RNA, 20 nt, synthetic construct
  source 1..20: mol_type = other RNA
agtggcgagagaagaccccg

SEQ ID NO: 4655 - RNA, 20 nt, synthetic construct
  source 1..20: mol_type = other RNA
agtggctgggcactccgagg

SEQ ID NO: 4656 - RNA, 20 nt, synthetic construct
  source 1..20: mol_type = other RNA
agtgtccatcctcaggcctc

SEQ ID NO: 4657 - RNA, 20 nt, synthetic construct
  source 1..20: mol_type = other RNA
atactccgtctgctcaggga

SEQ ID NO: 4658 - RNA, 20 nt, synthetic construct
  source 1..20: mol_type = other RNA
atagtccacagagaacacag

SEQ ID NO: 4659 - RNA, 20 nt, synthetic construct
  source 1..20: mol_type = other RNA
atccagctccccatagtcca

SEQ ID NO: 4660 - RNA, 20 nt, synthetic construct
  source 1..20: mol_type = other RNA
atcccccgcccgcaggggct

SEQ ID NO: 4661 - RNA, 20 nt, synthetic construct
  source 1..20: mol_type = other RNA
atcctcaggcctcagtggct

SEQ ID NO: 4662 - RNA, 20 nt, synthetic construct
  source 1..20: mol_type = other RNA
atgaggtgcccattccgcta

SEQ ID NO: 4663 - RNA, 20 nt, synthetic construct
  source 1..20: mol_type = other RNA
atgccaccattgtctttcct

SEQ ID NO: 4664 - RNA, 20 nt, synthetic construct
  source 1..20: mol_type = other RNA
atggacactgctcttggccc

SEQ ID NO: 4665 - RNA, 20 nt, synthetic construct
  source 1..20: mol_type = other RNA
atgggcacctcatcccccgc

SEQ ID NO: 4666 - RNA, 20 nt, synthetic construct
  source 1..20: mol_type = other RNA
atggggagctggatttccag

SEQ ID NO: 4667 - RNA, 20 nt, synthetic construct
  source 1..20: mol_type = other RNA
atggtggcatactccgtctg

SEQ ID NO: 4668 - RNA, 20 nt, synthetic construct
  source 1..20: mol_type = other RNA
attccgctaggaaagacaat

SEQ ID NO: 4669 - RNA, 20 nt, synthetic construct
  source 1..20: mol_type = other RNA
attgtctttcctagcggaat

SEQ ID NO: 4670 - RNA, 20 nt, synthetic construct
  source 1..20: mol_type = other RNA
atttccagtggcgagagaag

SEQ ID NO: 4671 - RNA, 20 nt, synthetic construct
  source 1..20: mol_type = other RNA
caaagaaggaggacccctca

SEQ ID NO: 4672 - RNA, 20 nt, synthetic construct
  source 1..20: mol_type = other RNA
caagagcagtgtccatcctc

SEQ ID NO: 4673 - RNA, 20 nt, synthetic construct
  source 1..20: mol_type = other RNA
caaggaagccggtcagaggg

SEQ ID NO: 4674 - RNA, 20 nt, synthetic construct
  source 1..20: mol_type = other RNA
caatggtggcatactccgtc

SEQ ID NO: 4675 - RNA, 20 nt, synthetic construct
  source 1..20: mol_type = other RNA
cacagagaacacaggcacgg

SEQ ID NO: 4676 - RNA, 20 nt, synthetic construct
  source 1..20: mol_type = other RNA
cacaggcacggctgaggggt

SEQ ID NO: 4677 - RNA, 20 nt, synthetic construct
  source 1..20: mol_type = other RNA
cacagggcacggggggctcc

SEQ ID NO: 4678 - RNA, 20 nt, synthetic construct
  source 1..20: mol_type = other RNA
caccattgtctttcctagcg

SEQ ID NO: 4679 - RNA, 20 nt, synthetic construct
  source 1..20: mol_type = other RNA
cacctcatcccccgcccgca

SEQ ID NO: 4680 - RNA, 20 nt, synthetic construct
  source 1..20: mol_type = other RNA
cacggctgaggggtcctcct

SEQ ID NO: 4681 - RNA, 20 nt, synthetic construct
  source 1..20: mol_type = other RNA
cacggggggctccggggtct

SEQ ID NO: 4682 - RNA, 20 nt, synthetic construct
  source 1..20: mol_type = other RNA
cactccgagggccgtcagct

SEQ ID NO: 4683 - RNA, 20 nt, synthetic construct
  source 1..20: mol_type = other RNA
cactgaggcctgaggatgga

SEQ ID NO: 4684 - RNA, 20 nt, synthetic construct
  source 1..20: mol_type = other RNA
cactgctcttggcccctctg

SEQ ID NO: 4685 - RNA, 20 nt, synthetic construct
  source 1..20: mol_type = other RNA
cactggaaatccagctcccc

SEQ ID NO: 4686 - RNA, 20 nt, synthetic construct
  source 1..20: mol_type = other RNA
cactggtggccaaggaagcc

SEQ ID NO: 4687 - RNA, 20 nt, synthetic construct
  source 1..20: mol_type = other RNA
cagaacactggtggccaagg

SEQ ID NO: 4688 - RNA, 20 nt, synthetic construct
  source 1..20: mol_type = other RNA
cagacggagtatgccaccat

SEQ ID NO: 4689 - RNA, 20 nt, synthetic construct
  source 1..20: mol_type = other RNA
cagagaacacaggcacggct

SEQ ID NO: 4690 - RNA, 20 nt, synthetic construct
  source 1..20: mol_type = other RNA
cagaggggccaagagcagtg

SEQ ID NO: 4691 - RNA, 20 nt, synthetic construct
  source 1..20: mol_type = other RNA
cagccactgaggcctgagga

SEQ ID NO: 4692 - RNA, 20 nt, synthetic construct
  source 1..20: mol_type = other RNA
cagccgtgcctgtgttctct

SEQ ID NO: 4693 - RNA, 20 nt, synthetic construct
  source 1..20: mol_type = other RNA
cagctccccatagtccacag

SEQ ID NO: 4694 - RNA, 20 nt, synthetic construct
  source 1..20: mol_type = other RNA
cagctgacggccctcggagt

SEQ ID NO: 4695 - RNA, 20 nt, synthetic construct
  source 1..20: mol_type = other RNA
cagctgagcccctgcgggcg

SEQ ID NO: 4696 - RNA, 20 nt, synthetic construct
  source 1..20: mol_type = other RNA
caggcacggctgaggggtcc

SEQ ID NO: 4697 - RNA, 20 nt, synthetic construct
  source 1..20: mol_type = other RNA
caggcctcagtggctgggca

SEQ ID NO: 4698 - RNA, 20 nt, synthetic construct
  source 1..20: mol_type = other RNA
cagggacacagggcacgggg

SEQ ID NO: 4699 - RNA, 20 nt, synthetic construct
  source 1..20: mol_type = other RNA
caggggctcagctgacggcc

SEQ ID NO: 4700 - RNA, 20 nt, synthetic construct
  source 1..20: mol_type = other RNA
cagtggcgagagaagacccc

SEQ ID NO: 4701 - RNA, 20 nt, synthetic construct
  source 1..20: mol_type = other RNA
cagtggctgggcactccgag

SEQ ID NO: 4702 - RNA, 20 nt, synthetic construct
  source 1..20: mol_type = other RNA
cagtgtccatcctcaggcct

SEQ ID NO: 4703 - RNA, 20 nt, synthetic construct
  source 1..20: mol_type = other RNA
catactccgtctgctcaggg

SEQ ID NO: 4704 - RNA, 20 nt, synthetic construct
  source 1..20: mol_type = other RNA
catagtccacagagaacaca

SEQ ID NO: 4705 - RNA, 20 nt, synthetic construct
  source 1..20: mol_type = other RNA
catcctcaggcctcagtggc

SEQ ID NO: 4706 - RNA, 20 nt, synthetic construct
  source 1..20: mol_type = other RNA
cattccgctaggaaagacaa

SEQ ID NO: 4707 - RNA, 20 nt, synthetic construct
  source 1..20: mol_type = other RNA
cattgtctttcctagcggaa

SEQ ID NO: 4708 - RNA, 20 nt, synthetic construct
  source 1..20: mol_type = other RNA
ccaagagcagtgtccatcct

SEQ ID NO: 4709 - RNA, 20 nt, synthetic construct
  source 1..20: mol_type = other RNA
ccaaggaagccggtcagagg

SEQ ID NO: 4710 - RNA, 20 nt, synthetic construct
  source 1..20: mol_type = other RNA
ccacagagaacacaggcacg

SEQ ID NO: 4711 - RNA, 20 nt, synthetic construct
  source 1..20: mol_type = other RNA
ccaccattgtctttcctagc

SEQ ID NO: 4712 - RNA, 20 nt, synthetic construct
  source 1..20: mol_type = other RNA
ccactgaggcctgaggatgg

SEQ ID NO: 4713 - RNA, 20 nt, synthetic construct
  source 1..20: mol_type = other RNA
ccactggaaatccagctccc

SEQ ID NO: 4714 - RNA, 20 nt, synthetic construct
  source 1..20: mol_type = other RNA
ccagccactgaggcctgagg

SEQ ID NO: 4715 - RNA, 20 nt, synthetic construct
  source 1..20: mol_type = other RNA
ccagctccccatagtccaca

SEQ ID NO: 4716 - RNA, 20 nt, synthetic construct
  source 1..20: mol_type = other RNA
ccagtggcgagagaagaccc

SEQ ID NO: 4717 - RNA, 20 nt, synthetic construct
  source 1..20: mol_type = other RNA
ccatagtccacagagaacac

SEQ ID NO: 4718 - RNA, 20 nt, synthetic construct
  source 1..20: mol_type = other RNA
ccatcctcaggcctcagtgg

SEQ ID NO: 4719 - RNA, 20 nt, synthetic construct
  source 1..20: mol_type = other RNA
ccattccgctaggaaagaca

SEQ ID NO: 4720 - RNA, 20 nt, synthetic construct
  source 1..20: mol_type = other RNA
ccattgtctttcctagcgga

SEQ ID NO: 4721 - RNA, 20 nt, synthetic construct
  source 1..20: mol_type = other RNA
cccagccactgaggcctgag

SEQ ID NO: 4722 - RNA, 20 nt, synthetic construct
  source 1..20: mol_type = other RNA
cccatagtccacagagaaca

SEQ ID NO: 4723 - RNA, 20 nt, synthetic construct
  source 1..20: mol_type = other RNA
cccattccgctaggaaagac

SEQ ID NO: 4724 - RNA, 20 nt, synthetic construct
  source 1..20: mol_type = other RNA
ccccatagtccacagagaac

SEQ ID NO: 4725 - RNA, 20 nt, synthetic construct
  source 1..20: mol_type = other RNA
ccccccgtgccctgtgtccc

SEQ ID NO: 4726 - RNA, 20 nt, synthetic construct
  source 1..20: mol_type = other RNA
cccccgtgccctgtgtccct

SEQ ID NO: 4727 - RNA, 20 nt, synthetic construct
  source 1..20: mol_type = other RNA
ccccgtgccctgtgtccctg

SEQ ID NO: 4728 - RNA, 20 nt, synthetic construct
  source 1..20: mol_type = other RNA
cccctcagccgtgcctgtgt

SEQ ID NO: 4729 - RNA, 20 nt, synthetic construct
  source 1..20: mol_type = other RNA
cccctctgaccggcttcctt

SEQ ID NO: 4730 - RNA, 20 nt, synthetic construct
  source 1..20: mol_type = other RNA
cccctgcgggcgggggatga

SEQ ID NO: 4731 - RNA, 20 nt, synthetic construct
  source 1..20: mol_type = other RNA
cccgcaggggctcagctgac

SEQ ID NO: 4732 - RNA, 20 nt, synthetic construct
  source 1..20: mol_type = other RNA
cccgtgccctgtgtccctga

SEQ ID NO: 4733 - RNA, 20 nt, synthetic construct
  source 1..20: mol_type = other RNA
ccctcagccgtgcctgtgtt

SEQ ID NO: 4734 - RNA, 20 nt, synthetic construct
  source 1..20: mol_type = other RNA
ccctcggagtgcccagccac

SEQ ID NO: 4735 - RNA, 20 nt, synthetic construct
  source 1..20: mol_type = other RNA
ccctctccctttctcctcaa

SEQ ID NO: 4736 - RNA, 20 nt, synthetic construct
  source 1..20: mol_type = other RNA
ccctctgaccggcttccttg

SEQ ID NO: 4737 - RNA, 20 nt, synthetic construct
  source 1..20: mol_type = other RNA
ccctgagcagacggagtatg

SEQ ID NO: 4738 - RNA, 20 nt, synthetic construct
  source 1..20: mol_type = other RNA
ccctgcgggcgggggatgag

SEQ ID NO: 4739 - RNA, 20 nt, synthetic construct
  source 1..20: mol_type = other RNA
ccctgtgtccctgagcagac

SEQ ID NO: 4740 - RNA, 20 nt, synthetic construct
  source 1..20: mol_type = other RNA
ccctttctcctcaaagaagg

SEQ ID NO: 4741 - RNA, 20 nt, synthetic construct
  source 1..20: mol_type = other RNA
ccgagggccgtcagctgagc

SEQ ID NO: 4742 - RNA, 20 nt, synthetic construct
  source 1..20: mol_type = other RNA
ccgcaggggctcagctgacg

SEQ ID NO: 4743 - RNA, 20 nt, synthetic construct
  source 1..20: mol_type = other RNA
ccgcccgcaggggctcagct

SEQ ID NO: 4744 - RNA, 20 nt, synthetic construct
  source 1..20: mol_type = other RNA
ccgctaggaaagacaatggt

SEQ ID NO: 4745 - RNA, 20 nt, synthetic construct
  source 1..20: mol_type = other RNA
ccggcttccttggccaccag

SEQ ID NO: 4746 - RNA, 20 nt, synthetic construct
  source 1..20: mol_type = other RNA
ccggggtcttctctcgccac

SEQ ID NO: 4747 - RNA, 20 nt, synthetic construct
  source 1..20: mol_type = other RNA
ccggtcagaggggccaagag

SEQ ID NO: 4748 - RNA, 20 nt, synthetic construct
  source 1..20: mol_type = other RNA
ccgtcagctgagcccctgcg

SEQ ID NO: 4749 - RNA, 20 nt, synthetic construct
  source 1..20: mol_type = other RNA
ccgtctgctcagggacacag

SEQ ID NO: 4750 - RNA, 20 nt, synthetic construct
  source 1..20: mol_type = other RNA
ccgtgccctgtgtccctgag

SEQ ID NO: 4751 - RNA, 20 nt, synthetic construct
  source 1..20: mol_type = other RNA
ccgtgcctgtgttctctgtg

SEQ ID NO: 4752 - RNA, 20 nt, synthetic construct
  source 1..20: mol_type = other RNA
ccgtggggctgactccctct

SEQ ID NO: 4753 - RNA, 20 nt, synthetic construct
  source 1..20: mol_type = other RNA
cctagcggaatgggcacctc

SEQ ID NO: 4754 - RNA, 20 nt, synthetic construct
  source 1..20: mol_type = other RNA
cctcaaagaaggaggacccc

SEQ ID NO: 4755 - RNA, 20 nt, synthetic construct
  source 1..20: mol_type = other RNA
cctcagccgtgcctgtgttc

SEQ ID NO: 4756 - RNA, 20 nt, synthetic construct
  source 1..20: mol_type = other RNA
cctcaggcctcagtggctgg

SEQ ID NO: 4757 - RNA, 20 nt, synthetic construct
  source 1..20: mol_type = other RNA
cctcagtggctgggcactcc

SEQ ID NO: 4758 - RNA, 20 nt, synthetic construct
  source 1..20: mol_type = other RNA
cctcatcccccgcccgcagg

SEQ ID NO: 4759 - RNA, 20 nt, synthetic construct
  source 1..20: mol_type = other RNA
cctccttctttgaggagaaa

SEQ ID NO: 4760 - RNA, 20 nt, synthetic construct
  source 1..20: mol_type = other RNA
cctcggagtgcccagccact

SEQ ID NO: 4761 - RNA, 20 nt, synthetic construct
  source 1..20: mol_type = other RNA
cctctccctttctcctcaaa

SEQ ID NO: 4762 - RNA, 20 nt, synthetic construct
  source 1..20: mol_type = other RNA
cctctgaccggcttccttgg

SEQ ID NO: 4763 - RNA, 20 nt, synthetic construct
  source 1..20: mol_type = other RNA
cctgagcagacggagtatgc

SEQ ID NO: 4764 - RNA, 20 nt, synthetic construct
  source 1..20: mol_type = other RNA
cctgaggatggacactgctc

SEQ ID NO: 4765 - RNA, 20 nt, synthetic construct
  source 1..20: mol_type = other RNA
cctgcgggcgggggatgagg

SEQ ID NO: 4766 - RNA, 20 nt, synthetic construct
  source 1..20: mol_type = other RNA
cctgtgtccctgagcagacg

SEQ ID NO: 4767 - RNA, 20 nt, synthetic construct
  source 1..20: mol_type = other RNA
cctgtgttctctgtggacta

SEQ ID NO: 4768 - RNA, 20 nt, synthetic construct
  source 1..20: mol_type = other RNA
ccttctttgaggagaaaggg

SEQ ID NO: 4769 - RNA, 20 nt, synthetic construct
  source 1..20: mol_type = other RNA
ccttggccaccagtgttctg

SEQ ID NO: 4770 - RNA, 20 nt, synthetic construct
  source 1..20: mol_type = other RNA
cctttctcctcaaagaagga

SEQ ID NO: 4771 - RNA, 20 nt, synthetic construct
  source 1..20: mol_type = other RNA
cgagagaagaccccggagcc

SEQ ID NO: 4772 - RNA, 20 nt, synthetic construct
  source 1..20: mol_type = other RNA
cgagggccgtcagctgagcc

SEQ ID NO: 4773 - RNA, 20 nt, synthetic construct
  source 1..20: mol_type = other RNA
cgcaggggctcagctgacgg

SEQ ID NO: 4774 - RNA, 20 nt, synthetic construct
  source 1..20: mol_type = other RNA
cgccactggaaatccagctc

SEQ ID NO: 4775 - RNA, 20 nt, synthetic construct
  source 1..20: mol_type = other RNA
cgcccgcaggggctcagctg

SEQ ID NO: 4776 - RNA, 20 nt, synthetic construct
  source 1..20: mol_type = other RNA
cgctaggaaagacaatggtg

SEQ ID NO: 4777 - RNA, 20 nt, synthetic construct
  source 1..20: mol_type = other RNA
cggaatgggcacctcatccc

SEQ ID NO: 4778 - RNA, 20 nt, synthetic construct
  source 1..20: mol_type = other RNA
cggagccccccgtgccctgt

SEQ ID NO: 4779 - RNA, 20 nt, synthetic construct
  source 1..20: mol_type = other RNA
cggagtatgccaccattgtc

SEQ ID NO: 4780 - RNA, 20 nt, synthetic construct
  source 1..20: mol_type = other RNA
cggagtgcccagccactgag

SEQ ID NO: 4781 - RNA, 20 nt, synthetic construct
  source 1..20: mol_type = other RNA
cggccctcggagtgcccagc

SEQ ID NO: 4782 - RNA, 20 nt, synthetic construct
  source 1..20: mol_type = other RNA
cggctgaggggtcctccttc

SEQ ID NO: 4783 - RNA, 20 nt, synthetic construct
  source 1..20: mol_type = other RNA
cggcttccttggccaccagt

SEQ ID NO: 4784 - RNA, 20 nt, synthetic construct
  source 1..20: mol_type = other RNA
cgggcgggggatgaggtgcc

SEQ ID NO: 4785 - RNA, 20 nt, synthetic construct
  source 1..20: mol_type = other RNA
cgggggatgaggtgcccatt

SEQ ID NO: 4786 - RNA, 20 nt, synthetic construct
  source 1..20: mol_type = other RNA
cggggggctccggggtcttc

SEQ ID NO: 4787 - RNA, 20 nt, synthetic construct
  source 1..20: mol_type = other RNA
cggggtcttctctcgccact

SEQ ID NO: 4788 - RNA, 20 nt, synthetic construct
  source 1..20: mol_type = other RNA
cggtcagaggggccaagagc

SEQ ID NO: 4789 - RNA, 20 nt, synthetic construct
  source 1..20: mol_type = other RNA
cgtcagctgagcccctgcgg

SEQ ID NO: 4790 - RNA, 20 nt, synthetic construct
  source 1..20: mol_type = other RNA
cgtctgctcagggacacagg

SEQ ID NO: 4791 - RNA, 20 nt, synthetic construct
  source 1..20: mol_type = other RNA
cgtgccctgtgtccctgagc

SEQ ID NO: 4792 - RNA, 20 nt, synthetic construct
  source 1..20: mol_type = other RNA
cgtgcctgtgttctctgtgg

SEQ ID NO: 4793 - RNA, 20 nt, synthetic construct
  source 1..20: mol_type = other RNA
cgtggggctgactccctctc

SEQ ID NO: 4794 - RNA, 20 nt, synthetic construct
  source 1..20: mol_type = other RNA
ctagcggaatgggcacctca

SEQ ID NO: 4795 - RNA, 20 nt, synthetic construct
  source 1..20: mol_type = other RNA
ctaggaaagacaatggtggc

SEQ ID NO: 4796 - RNA, 20 nt, synthetic construct
  source 1..20: mol_type = other RNA
ctatggggagctggatttcc

SEQ ID NO: 4797 - RNA, 20 nt, synthetic construct
  source 1..20: mol_type = other RNA
ctcaaagaaggaggacccct

SEQ ID NO: 4798 - RNA, 20 nt, synthetic construct
  source 1..20: mol_type = other RNA
ctcagccgtgcctgtgttct

SEQ ID NO: 4799 - RNA, 20 nt, synthetic construct
  source 1..20: mol_type = other RNA
ctcagctgacggccctcgga

SEQ ID NO: 4800 - RNA, 20 nt, synthetic construct
  source 1..20: mol_type = other RNA
ctcaggcctcagtggctggg

SEQ ID NO: 4801 - RNA, 20 nt, synthetic construct
  source 1..20: mol_type = other RNA
ctcagggacacagggcacgg

SEQ ID NO: 4802 - RNA, 20 nt, synthetic construct
  source 1..20: mol_type = other RNA
ctcagtggctgggcactccg

SEQ ID NO: 4803 - RNA, 20 nt, synthetic construct
  source 1..20: mol_type = other RNA
ctcatcccccgcccgcaggg

SEQ ID NO: 4804 - RNA, 20 nt, synthetic construct
  source 1..20: mol_type = other RNA
ctccccatagtccacagaga

SEQ ID NO: 4805 - RNA, 20 nt, synthetic construct
  source 1..20: mol_type = other RNA
ctccctctccctttctcctc

SEQ ID NO: 4806 - RNA, 20 nt, synthetic construct
  source 1..20: mol_type = other RNA
ctccctttctcctcaaagaa

SEQ ID NO: 4807 - RNA, 20 nt, synthetic construct
  source 1..20: mol_type = other RNA
ctccgagggccgtcagctga

SEQ ID NO: 4808 - RNA, 20 nt, synthetic construct
  source 1..20: mol_type = other RNA
ctccggggtcttctctcgcc

SEQ ID NO: 4809 - RNA, 20 nt, synthetic construct
  source 1..20: mol_type = other RNA
ctccgtctgctcagggacac

SEQ ID NO: 4810 - RNA, 20 nt, synthetic construct
  source 1..20: mol_type = other RNA
ctcctcaaagaaggaggacc

SEQ ID NO: 4811 - RNA, 20 nt, synthetic construct
  source 1..20: mol_type = other RNA
ctccttctttgaggagaaag

SEQ ID NO: 4812 - RNA, 20 nt, synthetic construct
  source 1..20: mol_type = other RNA
ctcgccactggaaatccagc

SEQ ID NO: 4813 - RNA, 20 nt, synthetic construct
  source 1..20: mol_type = other RNA
ctcggagtgcccagccactg

SEQ ID NO: 4814 - RNA, 20 nt, synthetic construct
  source 1..20: mol_type = other RNA
ctctccctttctcctcaaag

SEQ ID NO: 4815 - RNA, 20 nt, synthetic construct
  source 1..20: mol_type = other RNA
ctctcgccactggaaatcca

SEQ ID NO: 4816 - RNA, 20 nt, synthetic construct
  source 1..20: mol_type = other RNA
ctctgaccggcttccttggc

SEQ ID NO: 4817 - RNA, 20 nt, synthetic construct
  source 1..20: mol_type = other RNA
ctctgtggactatggggagc

SEQ ID NO: 4818 - RNA, 20 nt, synthetic construct
  source 1..20: mol_type = other RNA
ctcttggcccctctgaccgg

SEQ ID NO: 4819 - RNA, 20 nt, synthetic construct
  source 1..20: mol_type = other RNA
ctgaccggcttccttggcca

SEQ ID NO: 4820 - RNA, 20 nt, synthetic construct
  source 1..20: mol_type = other RNA
ctgacggccctcggagtgcc

SEQ ID NO: 4821 - RNA, 20 nt, synthetic construct
  source 1..20: mol_type = other RNA
ctgactccctctccctttct

SEQ ID NO: 4822 - RNA, 20 nt, synthetic construct
  source 1..20: mol_type = other RNA
ctgagcagacggagtatgcc

SEQ ID NO: 4823 - RNA, 20 nt, synthetic construct
  source 1..20: mol_type = other RNA
ctgaggatggacactgctct

SEQ ID NO: 4824 - RNA, 20 nt, synthetic construct
  source 1..20: mol_type = other RNA
ctgaggcctgaggatggaca

SEQ ID NO: 4825 - RNA, 20 nt, synthetic construct
  source 1..20: mol_type = other RNA
ctgaggggtcctccttcttt

SEQ ID NO: 4826 - RNA, 20 nt, synthetic construct
  source 1..20: mol_type = other RNA
ctgcagaacactggtggcca

SEQ ID NO: 4827 - RNA, 20 nt, synthetic construct
  source 1..20: mol_type = other RNA
ctgcgggcgggggatgaggt

SEQ ID NO: 4828 - RNA, 20 nt, synthetic construct
  source 1..20: mol_type = other RNA
ctgctcagggacacagggca

SEQ ID NO: 4829 - RNA, 20 nt, synthetic construct
  source 1..20: mol_type = other RNA
ctgctcttggcccctctgac

SEQ ID NO: 4830 - RNA, 20 nt, synthetic construct
  source 1..20: mol_type = other RNA
ctggaaatccagctccccat

SEQ ID NO: 4831 - RNA, 20 nt, synthetic construct
  source 1..20: mol_type = other RNA
ctggatttccagtggcgaga

SEQ ID NO: 4832 - RNA, 20 nt, synthetic construct
  source 1..20: mol_type = other RNA
ctgggcactccgagggccgt

SEQ ID NO: 4833 - RNA, 20 nt, synthetic construct
  source 1..20: mol_type = other RNA
ctggtggccaaggaagccgg

SEQ ID NO: 4834 - RNA, 20 nt, synthetic construct
  source 1..20: mol_type = other RNA
ctgtggactatggggagctg

SEQ ID NO: 4835 - RNA, 20 nt, synthetic construct
  source 1..20: mol_type = other RNA
ctgtgtccctgagcagacgg

SEQ ID NO: 4836 - RNA, 20 nt, synthetic construct
  source 1..20: mol_type = other RNA
ctgtgttctctgtggactat

SEQ ID NO: 4837 - RNA, 20 nt, synthetic construct
  source 1..20: mol_type = other RNA
cttccttggccaccagtgtt

SEQ ID NO: 4838 - RNA, 20 nt, synthetic construct
  source 1..20: mol_type = other RNA
cttctctcgccactggaaat

SEQ ID NO: 4839 - RNA, 20 nt, synthetic construct
  source 1..20: mol_type = other RNA
cttctttgaggagaaaggga

SEQ ID NO: 4840 - RNA, 20 nt, synthetic construct
  source 1..20: mol_type = other RNA
cttggccaccagtgttctgc

SEQ ID NO: 4841 - RNA, 20 nt, synthetic construct
  source 1..20: mol_type = other RNA
cttggcccctctgaccggct

SEQ ID NO: 4842 - RNA, 20 nt, synthetic construct
  source 1..20: mol_type = other RNA
ctttcctagcggaatgggca

SEQ ID NO: 4843 - RNA, 20 nt, synthetic construct
  source 1..20: mol_type = other RNA
ctttctcctcaaagaaggag

SEQ ID NO: 4844 - RNA, 20 nt, synthetic construct
  source 1..20: mol_type = other RNA
ctttgaggagaaagggagag

SEQ ID NO: 4845 - RNA, 20 nt, synthetic construct
  source 1..20: mol_type = other RNA
gaaagacaatggtggcatac

SEQ ID NO: 4846 - RNA, 20 nt, synthetic construct
  source 1..20: mol_type = other RNA
gaaagggagagggagtcagc

SEQ ID NO: 4847 - RNA, 20 nt, synthetic construct
  source 1..20: mol_type = other RNA
gaaatccagctccccatagt

SEQ ID NO: 4848 - RNA, 20 nt, synthetic construct
  source 1..20: mol_type = other RNA
gaacacaggcacggctgagg

SEQ ID NO: 4849 - RNA, 20 nt, synthetic construct
  source 1..20: mol_type = other RNA
gaacactggtggccaaggaa

SEQ ID NO: 4850 - RNA, 20 nt, synthetic construct
  source 1..20: mol_type = other RNA
gaagaccccggagccccccg

SEQ ID NO: 4851 - RNA, 20 nt, synthetic construct
  source 1..20: mol_type = other RNA
gaagccggtcagaggggcca

SEQ ID NO: 4852 - RNA, 20 nt, synthetic construct
  source 1..20: mol_type = other RNA
gaaggaggacccctcagccg

SEQ ID NO: 4853 - RNA, 20 nt, synthetic construct
  source 1..20: mol_type = other RNA
gaatgggcacctcatccccc

SEQ ID NO: 4854 - RNA, 20 nt, synthetic construct
  source 1..20: mol_type = other RNA
gacaatggtggcatactccg

SEQ ID NO: 4855 - RNA, 20 nt, synthetic construct
  source 1..20: mol_type = other RNA
gacacagggcacggggggct

SEQ ID NO: 4856 - RNA, 20 nt, synthetic construct
  source 1..20: mol_type = other RNA
gacactgctcttggcccctc

SEQ ID NO: 4857 - RNA, 20 nt, synthetic construct
  source 1..20: mol_type = other RNA
gacccctcagccgtgcctgt

SEQ ID NO: 4858 - RNA, 20 nt, synthetic construct
  source 1..20: mol_type = other RNA
gaccggcttccttggccacc

SEQ ID NO: 4859 - RNA, 20 nt, synthetic construct
  source 1..20: mol_type = other RNA
gacggagtatgccaccattg

SEQ ID NO: 4860 - RNA, 20 nt, synthetic construct
  source 1..20: mol_type = other RNA
gacggccctcggagtgccca

SEQ ID NO: 4861 - RNA, 20 nt, synthetic construct
  source 1..20: mol_type = other RNA
gactatggggagctggattt

SEQ ID NO: 4862 - RNA, 20 nt, synthetic construct
  source 1..20: mol_type = other RNA
gactccctctccctttctcc

SEQ ID NO: 4863 - RNA, 20 nt, synthetic construct
  source 1..20: mol_type = other RNA
gagaaagggagagggagtca

SEQ ID NO: 4864 - RNA, 20 nt, synthetic construct
  source 1..20: mol_type = other RNA
gagaacacaggcacggctga

SEQ ID NO: 4865 - RNA, 20 nt, synthetic construct
  source 1..20: mol_type = other RNA
gagaagaccccggagccccc

SEQ ID NO: 4866 - RNA, 20 nt, synthetic construct
  source 1..20: mol_type = other RNA
gagagaagaccccggagccc

SEQ ID NO: 4867 - RNA, 20 nt, synthetic construct
  source 1..20: mol_type = other RNA
gagcagacggagtatgccac

SEQ ID NO: 4868 - RNA, 20 nt, synthetic construct
  source 1..20: mol_type = other RNA
gagcagtgtccatcctcagg

SEQ ID NO: 4869 - RNA, 20 nt, synthetic construct
  source 1..20: mol_type = other RNA
gagccccccgtgccctgtgt

SEQ ID NO: 4870 - RNA, 20 nt, synthetic construct
  source 1..20: mol_type = other RNA
gagctggatttccagtggcg

SEQ ID NO: 4871 - RNA, 20 nt, synthetic construct
  source 1..20: mol_type = other RNA
gaggacccctcagccgtgcc

SEQ ID NO: 4872 - RNA, 20 nt, synthetic construct
  source 1..20: mol_type = other RNA
gaggagaaagggagagggag

SEQ ID NO: 4873 - RNA, 20 nt, synthetic construct
  source 1..20: mol_type = other RNA
gaggatggacactgctcttg

SEQ ID NO: 4874 - RNA, 20 nt, synthetic construct
  source 1..20: mol_type = other RNA
gaggcctgaggatggacact

SEQ ID NO: 4875 - RNA, 20 nt, synthetic construct
  source 1..20: mol_type = other RNA
gagggccgtcagctgagccc

SEQ ID NO: 4876 - RNA, 20 nt, synthetic construct
  source 1..20: mol_type = other RNA
gaggggccaagagcagtgtc

SEQ ID NO: 4877 - RNA, 20 nt, synthetic construct
  source 1..20: mol_type = other RNA
gaggggtcctccttctttga

SEQ ID NO: 4878 - RNA, 20 nt, synthetic construct
  source 1..20: mol_type = other RNA
gagggtctgcagaacactgg

SEQ ID NO: 4879 - RNA, 20 nt, synthetic construct
  source 1..20: mol_type = other RNA
gaggtgcccattccgctagg

SEQ ID NO: 4880 - RNA, 20 nt, synthetic construct
  source 1..20: mol_type = other RNA
gagtatgccaccattgtctt

SEQ ID NO: 4881 - RNA, 20 nt, synthetic construct
  source 1..20: mol_type = other RNA
gagtgcccagccactgaggc

SEQ ID NO: 4882 - RNA, 20 nt, synthetic construct
  source 1..20: mol_type = other RNA
gatgaggtgcccattccgct

SEQ ID NO: 4883 - RNA, 20 nt, synthetic construct
  source 1..20: mol_type = other RNA
gatggacactgctcttggcc

SEQ ID NO: 4884 - RNA, 20 nt, synthetic construct
  source 1..20: mol_type = other RNA
gatttccagtggcgagagaa

SEQ ID NO: 4885 - RNA, 20 nt, synthetic construct
  source 1..20: mol_type = other RNA
gcacctcatcccccgcccgc

SEQ ID NO: 4886 - RNA, 20 nt, synthetic construct
  source 1..20: mol_type = other RNA
gcacggctgaggggtcctcc

SEQ ID NO: 4887 - RNA, 20 nt, synthetic construct
  source 1..20: mol_type = other RNA
gcactccgagggccgtcagc

SEQ ID NO: 4888 - RNA, 20 nt, synthetic construct
  source 1..20: mol_type = other RNA
gcagaacactggtggccaag

SEQ ID NO: 4889 - RNA, 20 nt, synthetic construct
  source 1..20: mol_type = other RNA
gcagacggagtatgccacca

SEQ ID NO: 4890 - RNA, 20 nt, synthetic construct
  source 1..20: mol_type = other RNA
gcaggggctcagctgacggc

SEQ ID NO: 4891 - RNA, 20 nt, synthetic construct
  source 1..20: mol_type = other RNA
gcagtgtccatcctcaggcc

SEQ ID NO: 4892 - RNA, 20 nt, synthetic construct
  source 1..20: mol_type = other RNA
gcatactccgtctgctcagg

SEQ ID NO: 4893 - RNA, 20 nt, synthetic construct
  source 1..20: mol_type = other RNA
gccaagagcagtgtccatcc

SEQ ID NO: 4894 - RNA, 20 nt, synthetic construct
  source 1..20: mol_type = other RNA
gccaaggaagccggtcagag

SEQ ID NO: 4895 - RNA, 20 nt, synthetic construct
  source 1..20: mol_type = other RNA
gccaccattgtctttcctag

SEQ ID NO: 4896 - RNA, 20 nt, synthetic construct
  source 1..20: mol_type = other RNA
gccactgaggcctgaggatg

SEQ ID NO: 4897 - RNA, 20 nt, synthetic construct
  source 1..20: mol_type = other RNA
gccactggaaatccagctcc

SEQ ID NO: 4898 - RNA, 20 nt, synthetic construct
  source 1..20: mol_type = other RNA
gcccagccactgaggcctga

SEQ ID NO: 4899 - RNA, 20 nt, synthetic construct
  source 1..20: mol_type = other RNA
gcccattccgctaggaaaga

SEQ ID NO: 4900 - RNA, 20 nt, synthetic construct
  source 1..20: mol_type = other RNA
gccccccgtgccctgtgtcc

SEQ ID NO: 4901 - RNA, 20 nt, synthetic construct
  source 1..20: mol_type = other RNA
gcccctctgaccggcttcct

SEQ ID NO: 4902 - RNA, 20 nt, synthetic construct
  source 1..20: mol_type = other RNA
gcccgcaggggctcagctga

SEQ ID NO: 4903 - RNA, 20 nt, synthetic construct
  source 1..20: mol_type = other RNA
gccctcggagtgcccagcca

SEQ ID NO: 4904 - RNA, 20 nt, synthetic construct
  source 1..20: mol_type = other RNA
gccctgtgtccctgagcaga

SEQ ID NO: 4905 - RNA, 20 nt, synthetic construct
  source 1..20: mol_type = other RNA
gccggtcagaggggccaaga

SEQ ID NO: 4906 - RNA, 20 nt, synthetic construct
  source 1..20: mol_type = other RNA
gccgtcagctgagcccctgc

SEQ ID NO: 4907 - RNA, 20 nt, synthetic construct
  source 1..20: mol_type = other RNA
gccgtgcctgtgttctctgt

SEQ ID NO: 4908 - RNA, 20 nt, synthetic construct
  source 1..20: mol_type = other RNA
gccgtggggctgactccctc

SEQ ID NO: 4909 - RNA, 20 nt, synthetic construct
  source 1..20: mol_type = other RNA
gcctcagtggctgggcactc

SEQ ID NO: 4910 - RNA, 20 nt, synthetic construct
  source 1..20: mol_type = other RNA
gcctgaggatggacactgct

SEQ ID NO: 4911 - RNA, 20 nt, synthetic construct
  source 1..20: mol_type = other RNA
gcctgtgttctctgtggact

SEQ ID NO: 4912 - RNA, 20 nt, synthetic construct
  source 1..20: mol_type = other RNA
gcgagagaagaccccggagc

SEQ ID NO: 4913 - RNA, 20 nt, synthetic construct
  source 1..20: mol_type = other RNA
gcggaatgggcacctcatcc

SEQ ID NO: 4914 - RNA, 20 nt, synthetic construct
  source 1..20: mol_type = other RNA
gcgggcgggggatgaggtgc

SEQ ID NO: 4915 - RNA, 20 nt, synthetic construct
  source 1..20: mol_type = other RNA
gcgggggatgaggtgcccat

SEQ ID NO: 4916 - RNA, 20 nt, synthetic construct
  source 1..20: mol_type = other RNA
gctaggaaagacaatggtgg

SEQ ID NO: 4917 - RNA, 20 nt, synthetic construct
  source 1..20: mol_type = other RNA
gctcagctgacggccctcgg

SEQ ID NO: 4918 - RNA, 20 nt, synthetic construct
  source 1..20: mol_type = other RNA
gctcagggacacagggcacg

SEQ ID NO: 4919 - RNA, 20 nt, synthetic construct
  source 1..20: mol_type = other RNA
gctccccatagtccacagag

SEQ ID NO: 4920 - RNA, 20 nt, synthetic construct
  source 1..20: mol_type = other RNA
gctccggggtcttctctcgc

SEQ ID NO: 4921 - RNA, 20 nt, synthetic construct
  source 1..20: mol_type = other RNA
gctcttggcccctctgaccg

SEQ ID NO: 4922 - RNA, 20 nt, synthetic construct
  source 1..20: mol_type = other RNA
gctgacggccctcggagtgc

SEQ ID NO: 4923 - RNA, 20 nt, synthetic construct
  source 1..20: mol_type = other RNA
gctgactccctctccctttc

SEQ ID NO: 4924 - RNA, 20 nt, synthetic construct
  source 1..20: mol_type = other RNA
gctgaggggtcctccttctt

SEQ ID NO: 4925 - RNA, 20 nt, synthetic construct
  source 1..20: mol_type = other RNA
gctggatttccagtggcgag

SEQ ID NO: 4926 - RNA, 20 nt, synthetic construct
  source 1..20: mol_type = other RNA
gctgggcactccgagggccg

SEQ ID NO: 4927 - RNA, 20 nt, synthetic construct
  source 1..20: mol_type = other RNA
gcttccttggccaccagtgt

SEQ ID NO: 4928 - RNA, 20 nt, synthetic construct
  source 1..20: mol_type = other RNA
ggaaagacaatggtggcata

SEQ ID NO: 4929 - RNA, 20 nt, synthetic construct
  source 1..20: mol_type = other RNA
ggaaatccagctccccatag

SEQ ID NO: 4930 - RNA, 20 nt, synthetic construct
  source 1..20: mol_type = other RNA
ggaagccggtcagaggggcc

SEQ ID NO: 4931 - RNA, 20 nt, synthetic construct
  source 1..20: mol_type = other RNA
ggaatgggcacctcatcccc

SEQ ID NO: 4932 - RNA, 20 nt, synthetic construct
  source 1..20: mol_type = other RNA
ggacacagggcacggggggc

SEQ ID NO: 4933 - RNA, 20 nt, synthetic construct
  source 1..20: mol_type = other RNA
ggacactgctcttggcccct

SEQ ID NO: 4934 - RNA, 20 nt, synthetic construct
  source 1..20: mol_type = other RNA
ggacccctcagccgtgcctg

SEQ ID NO: 4935 - RNA, 20 nt, synthetic construct
  source 1..20: mol_type = other RNA
ggactatggggagctggatt

SEQ ID NO: 4936 - RNA, 20 nt, synthetic construct
  source 1..20: mol_type = other RNA
ggagaaagggagagggagtc

SEQ ID NO: 4937 - RNA, 20 nt, synthetic construct
  source 1..20: mol_type = other RNA
ggagccccccgtgccctgtg

SEQ ID NO: 4938 - RNA, 20 nt, synthetic construct
  source 1..20: mol_type = other RNA
ggagctggatttccagtggc

SEQ ID NO: 4939 - RNA, 20 nt, synthetic construct
  source 1..20: mol_type = other RNA
ggaggacccctcagccgtgc

SEQ ID NO: 4940 - RNA, 20 nt, synthetic construct
  source 1..20: mol_type = other RNA
ggagggtctgcagaacactg

SEQ ID NO: 4941 - RNA, 20 nt, synthetic construct
  source 1..20: mol_type = other RNA
ggagtatgccaccattgtct

SEQ ID NO: 4942 - RNA, 20 nt, synthetic construct
  source 1..20: mol_type = other RNA
ggagtgcccagccactgagg

SEQ ID NO: 4943 - RNA, 20 nt, synthetic construct
  source 1..20: mol_type = other RNA
ggatgaggtgcccattccgc

SEQ ID NO: 4944 - RNA, 20 nt, synthetic construct
  source 1..20: mol_type = other RNA
ggatggacactgctcttggc

SEQ ID NO: 4945 - RNA, 20 nt, synthetic construct
  source 1..20: mol_type = other RNA
ggatttccagtggcgagaga

SEQ ID NO: 4946 - RNA, 20 nt, synthetic construct
  source 1..20: mol_type = other RNA
ggcacctcatcccccgcccg

SEQ ID NO: 4947 - RNA, 20 nt, synthetic construct
  source 1..20: mol_type = other RNA
ggcacggctgaggggtcctc

SEQ ID NO: 4948 - RNA, 20 nt, synthetic construct
  source 1..20: mol_type = other RNA
ggcactccgagggccgtcag

SEQ ID NO: 4949 - RNA, 20 nt, synthetic construct
  source 1..20: mol_type = other RNA
ggcatactccgtctgctcag

SEQ ID NO: 4950 - RNA, 20 nt, synthetic construct
  source 1..20: mol_type = other RNA
ggccaagagcagtgtccatc

SEQ ID NO: 4951 - RNA, 20 nt, synthetic construct
  source 1..20: mol_type = other RNA
ggccaaggaagccggtcaga

SEQ ID NO: 4952 - RNA, 20 nt, synthetic construct
  source 1..20: mol_type = other RNA
ggccaccagtgttctgcaga

SEQ ID NO: 4953 - RNA, 20 nt, synthetic construct
  source 1..20: mol_type = other RNA
ggcccctctgaccggcttcc

SEQ ID NO: 4954 - RNA, 20 nt, synthetic construct
  source 1..20: mol_type = other RNA
ggccctcggagtgcccagcc

SEQ ID NO: 4955 - RNA, 20 nt, synthetic construct
  source 1..20: mol_type = other RNA
ggccgtcagctgagcccctg

SEQ ID NO: 4956 - RNA, 20 nt, synthetic construct
  source 1..20: mol_type = other RNA
ggccgtggggctgactccct

SEQ ID NO: 4957 - RNA, 20 nt, synthetic construct
  source 1..20: mol_type = other RNA
ggcctcagtggctgggcact

SEQ ID NO: 4958 - RNA, 20 nt, synthetic construct
  source 1..20: mol_type = other RNA
ggcctgaggatggacactgc

SEQ ID NO: 4959 - RNA, 20 nt, synthetic construct
  source 1..20: mol_type = other RNA
ggcgagagaagaccccggag

SEQ ID NO: 4960 - RNA, 20 nt, synthetic construct
  source 1..20: mol_type = other RNA
ggcgggggatgaggtgccca

SEQ ID NO: 4961 - RNA, 20 nt, synthetic construct
  source 1..20: mol_type = other RNA
ggctcagctgacggccctcg

SEQ ID NO: 4962 - RNA, 20 nt, synthetic construct
  source 1..20: mol_type = other RNA
ggctccggggtcttctctcg

SEQ ID NO: 4963 - RNA, 20 nt, synthetic construct
  source 1..20: mol_type = other RNA
ggctgactccctctcccttt

SEQ ID NO: 4964 - RNA, 20 nt, synthetic construct
  source 1..20: mol_type = other RNA
ggctgaggggtcctccttct

SEQ ID NO: 4965 - RNA, 20 nt, synthetic construct
  source 1..20: mol_type = other RNA
ggctgggcactccgagggcc

SEQ ID NO: 4966 - RNA, 20 nt, synthetic construct
  source 1..20: mol_type = other RNA
ggcttccttggccaccagtg

SEQ ID NO: 4967 - RNA, 20 nt, synthetic construct
  source 1..20: mol_type = other RNA
gggacacagggcacgggggg

SEQ ID NO: 4968 - RNA, 20 nt, synthetic construct
  source 1..20: mol_type = other RNA
gggagctggatttccagtgg

SEQ ID NO: 4969 - RNA, 20 nt, synthetic construct
  source 1..20: mol_type = other RNA
gggatgaggtgcccattccg

SEQ ID NO: 4970 - RNA, 20 nt, synthetic construct
  source 1..20: mol_type = other RNA
gggcacctcatcccccgccc

SEQ ID NO: 4971 - RNA, 20 nt, synthetic construct
  source 1..20: mol_type = other RNA
gggcactccgagggccgtca

SEQ ID NO: 4972 - RNA, 20 nt, synthetic construct
  source 1..20: mol_type = other RNA
gggccaagagcagtgtccat

SEQ ID NO: 4973 - RNA, 20 nt, synthetic construct
  source 1..20: mol_type = other RNA
gggccgtcagctgagcccct

SEQ ID NO: 4974 - RNA, 20 nt, synthetic construct
  source 1..20: mol_type = other RNA
gggcgggggatgaggtgccc

SEQ ID NO: 4975 - RNA, 20 nt, synthetic construct
  source 1..20: mol_type = other RNA
gggctcagctgacggccctc

SEQ ID NO: 4976 - RNA, 20 nt, synthetic construct
  source 1..20: mol_type = other RNA
gggctccggggtcttctctc

SEQ ID NO: 4977 - RNA, 20 nt, synthetic construct
  source 1..20: mol_type = other RNA
gggctgactccctctccctt

SEQ ID NO: 4978 - RNA, 20 nt, synthetic construct
  source 1..20: mol_type = other RNA
ggggagctggatttccagtg

SEQ ID NO: 4979 - RNA, 20 nt, synthetic construct
  source 1..20: mol_type = other RNA
ggggatgaggtgcccattcc

SEQ ID NO: 4980 - RNA, 20 nt, synthetic construct
  source 1..20: mol_type = other RNA
ggggccaagagcagtgtcca

SEQ ID NO: 4981 - RNA, 20 nt, synthetic construct
  source 1..20: mol_type = other RNA
ggggctcagctgacggccct

SEQ ID NO: 4982 - RNA, 20 nt, synthetic construct
  source 1..20: mol_type = other RNA
ggggctccggggtcttctct

SEQ ID NO: 4983 - RNA, 20 nt, synthetic construct
  source 1..20: mol_type = other RNA
ggggctgactccctctccct

SEQ ID NO: 4984 - RNA, 20 nt, synthetic construct
  source 1..20: mol_type = other RNA
gggggatgaggtgcccattc

SEQ ID NO: 4985 - RNA, 20 nt, synthetic construct
  source 1..20: mol_type = other RNA
gggggctccggggtcttctc

SEQ ID NO: 4986 - RNA, 20 nt, synthetic construct
  source 1..20: mol_type = other RNA
ggggggctccggggtcttct

SEQ ID NO: 4987 - RNA, 20 nt, synthetic construct
  source 1..20: mol_type = other RNA
ggggtcctccttctttgagg

SEQ ID NO: 4988 - RNA, 20 nt, synthetic construct
  source 1..20: mol_type = other RNA
ggggtcttctctcgccactg

SEQ ID NO: 4989 - RNA, 20 nt, synthetic construct
  source 1..20: mol_type = other RNA
gggtcctccttctttgagga

SEQ ID NO: 4990 - RNA, 20 nt, synthetic construct
  source 1..20: mol_type = other RNA
gggtctgcagaacactggtg

SEQ ID NO: 4991 - RNA, 20 nt, synthetic construct
  source 1..20: mol_type = other RNA
gggtcttctctcgccactgg

SEQ ID NO: 4992 - RNA, 20 nt, synthetic construct
  source 1..20: mol_type = other RNA
ggtcagaggggccaagagca

SEQ ID NO: 4993 - RNA, 20 nt, synthetic construct
  source 1..20: mol_type = other RNA
ggtcctccttctttgaggag

SEQ ID NO: 4994 - RNA, 20 nt, synthetic construct
  source 1..20: mol_type = other RNA
ggtctgcagaacactggtgg

SEQ ID NO: 4995 - RNA, 20 nt, synthetic construct
  source 1..20: mol_type = other RNA
ggtcttctctcgccactgga

SEQ ID NO: 4996 - RNA, 20 nt, synthetic construct
  source 1..20: mol_type = other RNA
ggtgcccattccgctaggaa

SEQ ID NO: 4997 - RNA, 20 nt, synthetic construct
  source 1..20: mol_type = other RNA
ggtggcatactccgtctgct

SEQ ID NO: 4998 - RNA, 20 nt, synthetic construct
  source 1..20: mol_type = other RNA
ggtggccaaggaagccggtc

SEQ ID NO: 4999 - RNA, 20 nt, synthetic construct
  source 1..20: mol_type = other RNA
gtatgccaccattgtctttc

SEQ ID NO: 5000 - RNA, 20 nt, synthetic construct
  source 1..20: mol_type = other RNA
gtcagaggggccaagagcag

SEQ ID NO: 5001 - RNA, 20 nt, synthetic construct
  source 1..20: mol_type = other RNA
gtcagctgagcccctgcggg

SEQ ID NO: 5002 - RNA, 20 nt, synthetic construct
  source 1..20: mol_type = other RNA
gtccacagagaacacaggca

SEQ ID NO: 5003 - RNA, 20 nt, synthetic construct
  source 1..20: mol_type = other RNA
gtccatcctcaggcctcagt

SEQ ID NO: 5004 - RNA, 20 nt, synthetic construct
  source 1..20: mol_type = other RNA
gtccctgagcagacggagta

SEQ ID NO: 5005 - RNA, 20 nt, synthetic construct
  source 1..20: mol_type = other RNA
gtcctccttctttgaggaga

SEQ ID NO: 5006 - RNA, 20 nt, synthetic construct
  source 1..20: mol_type = other RNA
gtctgcagaacactggtggc

SEQ ID NO: 5007 - RNA, 20 nt, synthetic construct
  source 1..20: mol_type = other RNA
gtctgctcagggacacaggg

SEQ ID NO: 5008 - RNA, 20 nt, synthetic construct
  source 1..20: mol_type = other RNA
gtcttctctcgccactggaa

SEQ ID NO: 5009 - RNA, 20 nt, synthetic construct
  source 1..20: mol_type = other RNA
gtctttcctagcggaatggg

SEQ ID NO: 5010 - RNA, 20 nt, synthetic construct
  source 1..20: mol_type = other RNA
gtgcccagccactgaggcct

SEQ ID NO: 5011 - RNA, 20 nt, synthetic construct
  source 1..20: mol_type = other RNA
gtgcccattccgctaggaaa

SEQ ID NO: 5012 - RNA, 20 nt, synthetic construct
  source 1..20: mol_type = other RNA
gtgccctgtgtccctgagca

SEQ ID NO: 5013 - RNA, 20 nt, synthetic construct
  source 1..20: mol_type = other RNA
gtgcctgtgttctctgtgga

SEQ ID NO: 5014 - RNA, 20 nt, synthetic construct
  source 1..20: mol_type = other RNA
gtggactatggggagctgga

SEQ ID NO: 5015 - RNA, 20 nt, synthetic construct
  source 1..20: mol_type = other RNA
gtggagggtctgcagaacac

SEQ ID NO: 5016 - RNA, 20 nt, synthetic construct
  source 1..20: mol_type = other RNA
gtggcatactccgtctgctc

SEQ ID NO: 5017 - RNA, 20 nt, synthetic construct
  source 1..20: mol_type = other RNA
gtggccaaggaagccggtca

SEQ ID NO: 5018 - RNA, 20 nt, synthetic construct
  source 1..20: mol_type = other RNA
gtggcgagagaagaccccgg

SEQ ID NO: 5019 - RNA, 20 nt, synthetic construct
  source 1..20: mol_type = other RNA
gtggctgggcactccgaggg

SEQ ID NO: 5020 - RNA, 20 nt, synthetic construct
  source 1..20: mol_type = other RNA
gtggggctgactccctctcc

SEQ ID NO: 5021 - RNA, 20 nt, synthetic construct
  source 1..20: mol_type = other RNA
gtgtccatcctcaggcctca

SEQ ID NO: 5022 - RNA, 20 nt, synthetic construct
  source 1..20: mol_type = other RNA
gtgtccctgagcagacggag

SEQ ID NO: 5023 - RNA, 20 nt, synthetic construct
  source 1..20: mol_type = other RNA
gtgttctctgtggactatgg

SEQ ID NO: 5024 - RNA, 20 nt, synthetic construct
  source 1..20: mol_type = other RNA
gttctctgtggactatgggg

SEQ ID NO: 5025 - RNA, 20 nt, synthetic construct
  source 1..20: mol_type = other RNA
tactccgtctgctcagggac

SEQ ID NO: 5026 - RNA, 20 nt, synthetic construct
  source 1..20: mol_type = other RNA
tagcggaatgggcacctcat

SEQ ID NO: 5027 - RNA, 20 nt, synthetic construct
  source 1..20: mol_type = other RNA
taggaaagacaatggtggca

SEQ ID NO: 5028 - RNA, 20 nt, synthetic construct
  source 1..20: mol_type = other RNA
tagtccacagagaacacagg

SEQ ID NO: 5029 - RNA, 20 nt, synthetic construct
  source 1..20: mol_type = other RNA
tatgccaccattgtctttcc

SEQ ID NO: 5030 - RNA, 20 nt, synthetic construct
  source 1..20: mol_type = other RNA
tatggggagctggatttcca

SEQ ID NO: 5031 - RNA, 20 nt, synthetic construct
  source 1..20: mol_type = other RNA
tcaaagaaggaggacccctc

SEQ ID NO: 5032 - RNA, 20 nt, synthetic construct
  source 1..20: mol_type = other RNA
tcagaggggccaagagcagt

SEQ ID NO: 5033 - RNA, 20 nt, synthetic construct
  source 1..20: mol_type = other RNA
tcagccgtgcctgtgttctc

SEQ ID NO: 5034 - RNA, 20 nt, synthetic construct
  source 1..20: mol_type = other RNA
tcagctgacggccctcggag

SEQ ID NO: 5035 - RNA, 20 nt, synthetic construct
  source 1..20: mol_type = other RNA
tcagctgagcccctgcgggc

SEQ ID NO: 5036 - RNA, 20 nt, synthetic construct
  source 1..20: mol_type = other RNA
tcaggcctcagtggctgggc

SEQ ID NO: 5037 - RNA, 20 nt, synthetic construct
  source 1..20: mol_type = other RNA
tcagggacacagggcacggg

SEQ ID NO: 5038 - RNA, 20 nt, synthetic construct
  source 1..20: mol_type = other RNA
tcagtggctgggcactccga

SEQ ID NO: 5039 - RNA, 20 nt, synthetic construct
  source 1..20: mol_type = other RNA
tcatcccccgcccgcagggg

SEQ ID NO: 5040 - RNA, 20 nt, synthetic construct
  source 1..20: mol_type = other RNA
tccacagagaacacaggcac

SEQ ID NO: 5041 - RNA, 20 nt, synthetic construct
  source 1..20: mol_type = other RNA
tccagctccccatagtccac

SEQ ID NO: 5042 - RNA, 20 nt, synthetic construct
  source 1..20: mol_type = other RNA
tccagtggcgagagaagacc

SEQ ID NO: 5043 - RNA, 20 nt, synthetic construct
  source 1..20: mol_type = other RNA
tccatcctcaggcctcagtg

SEQ ID NO: 5044 - RNA, 20 nt, synthetic construct
  source 1..20: mol_type = other RNA
tccccatagtccacagagaa

SEQ ID NO: 5045 - RNA, 20 nt, synthetic construct
  source 1..20: mol_type = other RNA
tccctctccctttctcctca

SEQ ID NO: 5046 - RNA, 20 nt, synthetic construct
  source 1..20: mol_type = other RNA
tccctgagcagacggagtat

SEQ ID NO: 5047 - RNA, 20 nt, synthetic construct
  source 1..20: mol_type = other RNA
tccctttctcctcaaagaag

SEQ ID NO: 5048 - RNA, 20 nt, synthetic construct
  source 1..20: mol_type = other RNA
tccgagggccgtcagctgag

SEQ ID NO: 5049 - RNA, 20 nt, synthetic construct
  source 1..20: mol_type = other RNA
tccgctaggaaagacaatgg

SEQ ID NO: 5050 - RNA, 20 nt, synthetic construct
  source 1..20: mol_type = other RNA
tccggggtcttctctcgcca

SEQ ID NO: 5051 - RNA, 20 nt, synthetic construct
  source 1..20: mol_type = other RNA
tccgtctgctcagggacaca

SEQ ID NO: 5052 - RNA, 20 nt, synthetic construct
  source 1..20: mol_type = other RNA
tcctagcggaatgggcacct

SEQ ID NO: 5053 - RNA, 20 nt, synthetic construct
  source 1..20: mol_type = other RNA
tcctcaaagaaggaggaccc

SEQ ID NO: 5054 - RNA, 20 nt, synthetic construct
  source 1..20: mol_type = other RNA
tcctcaggcctcagtggctg

SEQ ID NO: 5055 - RNA, 20 nt, synthetic construct
  source 1..20: mol_type = other RNA
tcctccttctttgaggagaa

SEQ ID NO: 5056 - RNA, 20 nt, synthetic construct
  source 1..20: mol_type = other RNA
tccttctttgaggagaaagg

SEQ ID NO: 5057 - RNA, 20 nt, synthetic construct
  source 1..20: mol_type = other RNA
tccttggccaccagtgttct

SEQ ID NO: 5058 - RNA, 20 nt, synthetic construct
  source 1..20: mol_type = other RNA
tcgccactggaaatccagct

SEQ ID NO: 5059 - RNA, 20 nt, synthetic construct
  source 1..20: mol_type = other RNA
tcggagtgcccagccactga

SEQ ID NO: 5060 - RNA, 20 nt, synthetic construct
  source 1..20: mol_type = other RNA
tctccctttctcctcaaaga

SEQ ID NO: 5061 - RNA, 20 nt, synthetic construct
  source 1..20: mol_type = other RNA
tctcctcaaagaaggaggac

SEQ ID NO: 5062 - RNA, 20 nt, synthetic construct
  source 1..20: mol_type = other RNA
tctcgccactggaaatccag

SEQ ID NO: 5063 - RNA, 20 nt, synthetic construct
  source 1..20: mol_type = other RNA
tctctcgccactggaaatcc

SEQ ID NO: 5064 - RNA, 20 nt, synthetic construct
  source 1..20: mol_type = other RNA
tctctgtggactatggggag

SEQ ID NO: 5065 - RNA, 20 nt, synthetic construct
  source 1..20: mol_type = other RNA
tctgaccggcttccttggcc

SEQ ID NO: 5066 - RNA, 20 nt, synthetic construct
  source 1..20: mol_type = other RNA
tctgcagaacactggtggcc

SEQ ID NO: 5067 - RNA, 20 nt, synthetic construct
  source 1..20: mol_type = other RNA
tctgctcagggacacagggc

SEQ ID NO: 5068 - RNA, 20 nt, synthetic construct
  source 1..20: mol_type = other RNA
tctgtggactatggggagct

SEQ ID NO: 5069 - RNA, 20 nt, synthetic construct
  source 1..20: mol_type = other RNA
tcttctctcgccactggaaa

SEQ ID NO: 5070 - RNA, 20 nt, synthetic construct
  source 1..20: mol_type = other RNA
tcttggcccctctgaccggc

SEQ ID NO: 5071 - RNA, 20 nt, synthetic construct
  source 1..20: mol_type = other RNA
tctttcctagcggaatgggc

SEQ ID NO: 5072 - RNA, 20 nt, synthetic construct
  source 1..20: mol_type = other RNA
tctttgaggagaaagggaga

SEQ ID NO: 5073 - RNA, 20 nt, synthetic construct
  source 1..20: mol_type = other RNA
tgaccggcttccttggccac

SEQ ID NO: 5074 - RNA, 20 nt, synthetic construct
  source 1..20: mol_type = other RNA
tgacggccctcggagtgccc

SEQ ID NO: 5075 - RNA, 20 nt, synthetic construct
  source 1..20: mol_type = other RNA
tgactccctctccctttctc

SEQ ID NO: 5076 - RNA, 20 nt, synthetic construct
  source 1..20: mol_type = other RNA
tgagcagacggagtatgcca

SEQ ID NO: 5077 - RNA, 20 nt, synthetic construct
  source 1..20: mol_type = other RNA
tgaggagaaagggagaggga

SEQ ID NO: 5078 - RNA, 20 nt, synthetic construct
  source 1..20: mol_type = other RNA
tgaggatggacactgctctt

SEQ ID NO: 5079 - RNA, 20 nt, synthetic construct
  source 1..20: mol_type = other RNA
tgaggcctgaggatggacac

SEQ ID NO: 5080 - RNA, 20 nt, synthetic construct
  source 1..20: mol_type = other RNA
tgaggggtcctccttctttg

SEQ ID NO: 5081 - RNA, 20 nt, synthetic construct
  source 1..20: mol_type = other RNA
tgaggtgcccattccgctag

SEQ ID NO: 5082 - RNA, 20 nt, synthetic construct
  source 1..20: mol_type = other RNA
tgcagaacactggtggccaa

SEQ ID NO: 5083 - RNA, 20 nt, synthetic construct
  source 1..20: mol_type = other RNA
tgccaccattgtctttccta

SEQ ID NO: 5084 - RNA, 20 nt, synthetic construct
  source 1..20: mol_type = other RNA
tgcccagccactgaggcctg

SEQ ID NO: 5085 - RNA, 20 nt, synthetic construct
  source 1..20: mol_type = other RNA
tgcccattccgctaggaaag

SEQ ID NO: 5086 - RNA, 20 nt, synthetic construct
  source 1..20: mol_type = other RNA
tgccctgtgtccctgagcag

SEQ ID NO: 5087 - RNA, 20 nt, synthetic construct
  source 1..20: mol_type = other RNA
tgcctgtgttctctgtggac

SEQ ID NO: 5088 - RNA, 20 nt, synthetic construct
  source 1..20: mol_type = other RNA
tgcgggcgggggatgaggtg

SEQ ID NO: 5089 - RNA, 20 nt, synthetic construct
  source 1..20: mol_type = other RNA
tgctcagggacacagggcac

SEQ ID NO: 5090 - RNA, 20 nt, synthetic construct
  source 1..20: mol_type = other RNA
tgctcttggcccctctgacc

SEQ ID NO: 5091 - RNA, 20 nt, synthetic construct
  source 1..20: mol_type = other RNA
tggaaatccagctccccata

SEQ ID NO: 5092 - RNA, 20 nt, synthetic construct
  source 1..20: mol_type = other RNA
tggacactgctcttggcccc

SEQ ID NO: 5093 - RNA, 20 nt, synthetic construct
  source 1..20: mol_type = other RNA
tggactatggggagctggat

SEQ ID NO: 5094 - RNA, 20 nt, synthetic construct
  source 1..20: mol_type = other RNA
tggagggtctgcagaacact

SEQ ID NO: 5095 - RNA, 20 nt, synthetic construct
  source 1..20: mol_type = other RNA
tggatttccagtggcgagag

SEQ ID NO: 5096 - RNA, 20 nt, synthetic construct
  source 1..20: mol_type = other RNA
tggcatactccgtctgctca

SEQ ID NO: 5097 - RNA, 20 nt, synthetic construct
  source 1..20: mol_type = other RNA
tggccaaggaagccggtcag

SEQ ID NO: 5098 - RNA, 20 nt, synthetic construct
  source 1..20: mol_type = other RNA
tggccaccagtgttctgcag

SEQ ID NO: 5099 - RNA, 20 nt, synthetic construct
  source 1..20: mol_type = other RNA
tggcccctctgaccggcttc

SEQ ID NO: 5100 - RNA, 20 nt, synthetic construct
  source 1..20: mol_type = other RNA
tggcgagagaagaccccgga

SEQ ID NO: 5101 - RNA, 20 nt, synthetic construct
  source 1..20: mol_type = other RNA
tggctgggcactccgagggc

SEQ ID NO: 5102 - RNA, 20 nt, synthetic construct
  source 1..20: mol_type = other RNA
tgggcacctcatcccccgcc

SEQ ID NO: 5103 - RNA, 20 nt, synthetic construct
  source 1..20: mol_type = other RNA
tgggcactccgagggccgtc

SEQ ID NO: 5104 - RNA, 20 nt, synthetic construct
  source 1..20: mol_type = other RNA
tggggagctggatttccagt

SEQ ID NO: 5105 - RNA, 20 nt, synthetic construct
  source 1..20: mol_type = other RNA
tggggctgactccctctccc

SEQ ID NO: 5106 - RNA, 20 nt, synthetic construct
  source 1..20: mol_type = other RNA
tggtggcatactccgtctgc

SEQ ID NO: 5107 - RNA, 20 nt, synthetic construct
  source 1..20: mol_type = other RNA
tggtggccaaggaagccggt

SEQ ID NO: 5108 - RNA, 20 nt, synthetic construct
  source 1..20: mol_type = other RNA
tgtccatcctcaggcctcag

SEQ ID NO: 5109 - RNA, 20 nt, synthetic construct
  source 1..20: mol_type = other RNA
tgtccctgagcagacggagt

SEQ ID NO: 5110 - RNA, 20 nt, synthetic construct
  source 1..20: mol_type = other RNA
tgtctttcctagcggaatgg

SEQ ID NO: 5111 - RNA, 20 nt, synthetic construct
  source 1..20: mol_type = other RNA
tgtggactatggggagctgg

SEQ ID NO: 5112 - RNA, 20 nt, synthetic construct
  source 1..20: mol_type = other RNA
tgtgtccctgagcagacgga

SEQ ID NO: 5113 - RNA, 20 nt, synthetic construct
  source 1..20: mol_type = other RNA
tgtgttctctgtggactatg

SEQ ID NO: 5114 - RNA, 20 nt, synthetic construct
  source 1..20: mol_type = other RNA
tgttctctgtggactatggg

SEQ ID NO: 5115 - RNA, 20 nt, synthetic construct
  source 1..20: mol_type = other RNA
ttccagtggcgagagaagac

SEQ ID NO: 5116 - RNA, 20 nt, synthetic construct
  source 1..20: mol_type = other RNA
ttccgctaggaaagacaatg

SEQ ID NO: 5117 - RNA, 20 nt, synthetic construct
  source 1..20: mol_type = other RNA
ttcctagcggaatgggcacc

SEQ ID NO: 5118 - RNA, 20 nt, synthetic construct
  source 1..20: mol_type = other RNA
ttccttggccaccagtgttc

SEQ ID NO: 5119 - RNA, 20 nt, synthetic construct
  source 1..20: mol_type = other RNA
ttctcctcaaagaaggagga

SEQ ID NO: 5120 - RNA, 20 nt, synthetic construct
  source 1..20: mol_type = other RNA
ttctctcgccactggaaatc

SEQ ID NO: 5121 - RNA, 20 nt, synthetic construct
  source 1..20: mol_type = other RNA
ttctctgtggactatgggga

SEQ ID NO: 5122 - RNA, 20 nt, synthetic construct
  source 1..20: mol_type = other RNA
ttctttgaggagaaagggag

SEQ ID NO: 5123 - RNA, 20 nt, synthetic construct
  source 1..20: mol_type = other RNA
ttgaggagaaagggagaggg

SEQ ID NO: 5124 - RNA, 20 nt, synthetic construct
  source 1..20: mol_type = other RNA
ttggccaccagtgttctgca

SEQ ID NO: 5125 - RNA, 20 nt, synthetic construct
  source 1..20: mol_type = other RNA
ttggcccctctgaccggctt

SEQ ID NO: 5126 - RNA, 20 nt, synthetic construct
  source 1..20: mol_type = other RNA
ttgtctttcctagcggaatg

SEQ ID NO: 5127 - RNA, 20 nt, synthetic construct
  source 1..20: mol_type = other RNA
tttccagtggcgagagaaga

SEQ ID NO: 5128 - RNA, 20 nt, synthetic construct
  source 1..20: mol_type = other RNA
tttcctagcggaatgggcac

SEQ ID NO: 5129 - RNA, 20 nt, synthetic construct
  source 1..20: mol_type = other RNA
tttctcctcaaagaaggagg

SEQ ID NO: 5130 - RNA, 20 nt, synthetic construct
  source 1..20: mol_type = other RNA
tttgaggagaaagggagagg

SEQ ID NO: 5131 - RNA, 21 nt, synthetic construct
  source 1..21: mol_type = other RNA
aaagaaggaggacccctcagc

SEQ ID NO: 5132 - RNA, 21 nt, synthetic construct
  source 1..21: mol_type = other RNA
aaagacaatggtggcatactc

SEQ ID NO: 5133 - RNA, 21 nt, synthetic construct
  source 1..21: mol_type = other RNA
aaatccagctccccatagtcc

SEQ ID NO: 5134 - RNA, 21 nt, synthetic construct
  source 1..21: mol_type = other RNA
aacacaggcacggctgagggg

SEQ ID NO: 5135 - RNA, 21 nt, synthetic construct
  source 1..21: mol_type = other RNA
aacactggtggccaaggaagc

SEQ ID NO: 5136 - RNA, 21 nt, synthetic construct
  source 1..21: mol_type = other RNA
aagaaggaggacccctcagcc

SEQ ID NO: 5137 - RNA, 21 nt, synthetic construct
  source 1..21: mol_type = other RNA
aagacaatggtggcatactcc

SEQ ID NO: 5138 - RNA, 21 nt, synthetic construct
  source 1..21: mol_type = other RNA
aagaccccggagccccccgtg

SEQ ID NO: 5139 - RNA, 21 nt, synthetic construct
  source 1..21: mol_type = other RNA
aagagcagtgtccatcctcag

SEQ ID NO: 5140 - RNA, 21 nt, synthetic construct
  source 1..21: mol_type = other RNA
aagccggtcagaggggccaag

SEQ ID NO: 5141 - RNA, 21 nt, synthetic construct
  source 1..21: mol_type = other RNA
aaggaagccggtcagaggggc

SEQ ID NO: 5142 - RNA, 21 nt, synthetic construct
  source 1..21: mol_type = other RNA
aaggaggacccctcagccgtg

SEQ ID NO: 5143 - RNA, 21 nt, synthetic construct
  source 1..21: mol_type = other RNA
aatccagctccccatagtcca

SEQ ID NO: 5144 - RNA, 21 nt, synthetic construct
  source 1..21: mol_type = other RNA
aatgggcacctcatcccccgc

SEQ ID NO: 5145 - RNA, 21 nt, synthetic construct
  source 1..21: mol_type = other RNA
aatggtggcatactccgtctg

SEQ ID NO: 5146 - RNA, 21 nt, synthetic construct
  source 1..21: mol_type = other RNA
acaatggtggcatactccgtc

SEQ ID NO: 5147 - RNA, 21 nt, synthetic construct
  source 1..21: mol_type = other RNA
acacaggcacggctgaggggt

SEQ ID NO: 5148 - RNA, 21 nt, synthetic construct
  source 1..21: mol_type = other RNA
acacagggcacggggggctcc

SEQ ID NO: 5149 - RNA, 21 nt, synthetic construct
  source 1..21: mol_type = other RNA
acactgctcttggcccctctg

SEQ ID NO: 5150 - RNA, 21 nt, synthetic construct
  source 1..21: mol_type = other RNA
acactggtggccaaggaagcc

SEQ ID NO: 5151 - RNA, 21 nt, synthetic construct
  source 1..21: mol_type = other RNA
acagagaacacaggcacggct

SEQ ID NO: 5152 - RNA, 21 nt, synthetic construct
  source 1..21: mol_type = other RNA
acaggcacggctgaggggtcc

SEQ ID NO: 5153 - RNA, 21 nt, synthetic construct
  source 1..21: mol_type = other RNA
accattgtctttcctagcgga

SEQ ID NO: 5154 - RNA, 21 nt, synthetic construct
  source 1..21: mol_type = other RNA
acccctcagccgtgcctgtgt

SEQ ID NO: 5155 - RNA, 21 nt, synthetic construct
  source 1..21: mol_type = other RNA
accggcttccttggccaccag

SEQ ID NO: 5156 - RNA, 21 nt, synthetic construct
  source 1..21: mol_type = other RNA
acctcatcccccgcccgcagg

SEQ ID NO: 5157 - RNA, 21 nt, synthetic construct
  source 1..21: mol_type = other RNA
acggagtatgccaccattgtc

SEQ ID NO: 5158 - RNA, 21 nt, synthetic construct
  source 1..21: mol_type = other RNA
acggccctcggagtgcccagc

SEQ ID NO: 5159 - RNA, 21 nt, synthetic construct
  source 1..21: mol_type = other RNA
acggctgaggggtcctccttc

SEQ ID NO: 5160 - RNA, 21 nt, synthetic construct
  source 1..21: mol_type = other RNA
acggggggctccggggtcttc

SEQ ID NO: 5161 - RNA, 21 nt, synthetic construct
  source 1..21: mol_type = other RNA
actatggggagctggatttcc

SEQ ID NO: 5162 - RNA, 21 nt, synthetic construct
  source 1..21: mol_type = other RNA
actccctctccctttctcctc

SEQ ID NO: 5163 - RNA, 21 nt, synthetic construct
  source 1..21: mol_type = other RNA
actccgagggccgtcagctga

SEQ ID NO: 5164 - RNA, 21 nt, synthetic construct
  source 1..21: mol_type = other RNA
actccgtctgctcagggacac

SEQ ID NO: 5165 - RNA, 21 nt, synthetic construct
  source 1..21: mol_type = other RNA
actgaggcctgaggatggaca

SEQ ID NO: 5166 - RNA, 21 nt, synthetic construct
  source 1..21: mol_type = other RNA
actgctcttggcccctctgac

SEQ ID NO: 5167 - RNA, 21 nt, synthetic construct
  source 1..21: mol_type = other RNA
actggaaatccagctccccat

SEQ ID NO: 5168 - RNA, 21 nt, synthetic construct
  source 1..21: mol_type = other RNA
actggtggccaaggaagccgg

SEQ ID NO: 5169 - RNA, 21 nt, synthetic construct
  source 1..21: mol_type = other RNA
agaaagggagagggagtcagc

SEQ ID NO: 5170 - RNA, 21 nt, synthetic construct
  source 1..21: mol_type = other RNA
agaacacaggcacggctgagg

SEQ ID NO: 5171 - RNA, 21 nt, synthetic construct
  source 1..21: mol_type = other RNA
agaacactggtggccaaggaa

SEQ ID NO: 5172 - RNA, 21 nt, synthetic construct
  source 1..21: mol_type = other RNA
agaagaccccggagccccccg

SEQ ID NO: 5173 - RNA, 21 nt, synthetic construct
  source 1..21: mol_type = other RNA
agaaggaggacccctcagccg

SEQ ID NO: 5174 - RNA, 21 nt, synthetic construct
  source 1..21: mol_type = other RNA
agacaatggtggcatactccg

SEQ ID NO: 5175 - RNA, 21 nt, synthetic construct
  source 1..21: mol_type = other RNA
agacggagtatgccaccattg

SEQ ID NO: 5176 - RNA, 21 nt, synthetic construct
  source 1..21: mol_type = other RNA
agagaacacaggcacggctga

SEQ ID NO: 5177 - RNA, 21 nt, synthetic construct
  source 1..21: mol_type = other RNA
agagaagaccccggagccccc

SEQ ID NO: 5178 - RNA, 21 nt, synthetic construct
  source 1..21: mol_type = other RNA
agagcagtgtccatcctcagg

SEQ ID NO: 5179 - RNA, 21 nt, synthetic construct
  source 1..21: mol_type = other RNA
agaggggccaagagcagtgtc

SEQ ID NO: 5180 - RNA, 21 nt, synthetic construct
  source 1..21: mol_type = other RNA
agcagacggagtatgccacca

SEQ ID NO: 5181 - RNA, 21 nt, synthetic construct
  source 1..21: mol_type = other RNA
agcagtgtccatcctcaggcc

SEQ ID NO: 5182 - RNA, 21 nt, synthetic construct
  source 1..21: mol_type = other RNA
agccactgaggcctgaggatg

SEQ ID NO: 5183 - RNA, 21 nt, synthetic construct
  source 1..21: mol_type = other RNA
agccccccgtgccctgtgtcc

SEQ ID NO: 5184 - RNA, 21 nt, synthetic construct
  source 1..21: mol_type = other RNA
agccggtcagaggggccaaga

SEQ ID NO: 5185 - RNA, 21 nt, synthetic construct
  source 1..21: mol_type = other RNA
agccgtgcctgtgttctctgt

SEQ ID NO: 5186 - RNA, 21 nt, synthetic construct
  source 1..21: mol_type = other RNA
agcggaatgggcacctcatcc

SEQ ID NO: 5187 - RNA, 21 nt, synthetic construct
  source 1..21: mol_type = other RNA
agctccccatagtccacagag

SEQ ID NO: 5188 - RNA, 21 nt, synthetic construct
  source 1..21: mol_type = other RNA
agctgacggccctcggagtgc

SEQ ID NO: 5189 - RNA, 21 nt, synthetic construct
  source 1..21: mol_type = other RNA
agctggatttccagtggcgag

SEQ ID NO: 5190 - RNA, 21 nt, synthetic construct
  source 1..21: mol_type = other RNA
aggaaagacaatggtggcata

SEQ ID NO: 5191 - RNA, 21 nt, synthetic construct
  source 1..21: mol_type = other RNA
aggaagccggtcagaggggcc

SEQ ID NO: 5192 - RNA, 21 nt, synthetic construct
  source 1..21: mol_type = other RNA
aggacccctcagccgtgcctg

SEQ ID NO: 5193 - RNA, 21 nt, synthetic construct
  source 1..21: mol_type = other RNA
aggagaaagggagagggagtc

SEQ ID NO: 5194 - RNA, 21 nt, synthetic construct
  source 1..21: mol_type = other RNA
aggaggacccctcagccgtgc

SEQ ID NO: 5195 - RNA, 21 nt, synthetic construct
  source 1..21: mol_type = other RNA
aggatggacactgctcttggc

SEQ ID NO: 5196 - RNA, 21 nt, synthetic construct
  source 1..21: mol_type = other RNA
aggcacggctgaggggtcctc

SEQ ID NO: 5197 - RNA, 21 nt, synthetic construct
  source 1..21: mol_type = other RNA
aggcctcagtggctgggcact

SEQ ID NO: 5198 - RNA, 21 nt, synthetic construct
  source 1..21: mol_type = other RNA
aggcctgaggatggacactgc

SEQ ID NO: 5199 - RNA, 21 nt, synthetic construct
  source 1..21: mol_type = other RNA
agggacacagggcacgggggg

SEQ ID NO: 5200 - RNA, 21 nt, synthetic construct
  source 1..21: mol_type = other RNA
agggccgtcagctgagcccct

SEQ ID NO: 5201 - RNA, 21 nt, synthetic construct
  source 1..21: mol_type = other RNA
aggggccaagagcagtgtcca

SEQ ID NO: 5202 - RNA, 21 nt, synthetic construct
  source 1..21: mol_type = other RNA
aggggctcagctgacggccct

SEQ ID NO: 5203 - RNA, 21 nt, synthetic construct
  source 1..21: mol_type = other RNA
aggggtcctccttctttgagg

SEQ ID NO: 5204 - RNA, 21 nt, synthetic construct
  source 1..21: mol_type = other RNA
agggtctgcagaacactggtg

SEQ ID NO: 5205 - RNA, 21 nt, synthetic construct
  source 1..21: mol_type = other RNA
aggtgcccattccgctaggaa

SEQ ID NO: 5206 - RNA, 21 nt, synthetic construct
  source 1..21: mol_type = other RNA
agtatgccaccattgtctttc

SEQ ID NO: 5207 - RNA, 21 nt, synthetic construct
  source 1..21: mol_type = other RNA
agtccacagagaacacaggca

SEQ ID NO: 5208 - RNA, 21 nt, synthetic construct
  source 1..21: mol_type = other RNA
agtgcccagccactgaggcct

SEQ ID NO: 5209 - RNA, 21 nt, synthetic construct
  source 1..21: mol_type = other RNA
agtggcgagagaagaccccgg

SEQ ID NO: 5210 - RNA, 21 nt, synthetic construct
  source 1..21: mol_type = other RNA
agtggctgggcactccgaggg

SEQ ID NO: 5211 - RNA, 21 nt, synthetic construct
  source 1..21: mol_type = other RNA
agtgtccatcctcaggcctca

SEQ ID NO: 5212 - RNA, 21 nt, synthetic construct
  source 1..21: mol_type = other RNA
atactccgtctgctcagggac

SEQ ID NO: 5213 - RNA, 21 nt, synthetic construct
  source 1..21: mol_type = other RNA
atagtccacagagaacacagg

SEQ ID NO: 5214 - RNA, 21 nt, synthetic construct
  source 1..21: mol_type = other RNA
atccagctccccatagtccac

SEQ ID NO: 5215 - RNA, 21 nt, synthetic construct
  source 1..21: mol_type = other RNA
atcctcaggcctcagtggctg

SEQ ID NO: 5216 - RNA, 21 nt, synthetic construct
  source 1..21: mol_type = other RNA
atgaggtgcccattccgctag

SEQ ID NO: 5217 - RNA, 21 nt, synthetic construct
  source 1..21: mol_type = other RNA
atgccaccattgtctttccta

SEQ ID NO: 5218 - RNA, 21 nt, synthetic construct
  source 1..21: mol_type = other RNA
atggacactgctcttggcccc

SEQ ID NO: 5219 - RNA, 21 nt, synthetic construct
  source 1..21: mol_type = other RNA
atgggcacctcatcccccgcc

SEQ ID NO: 5220 - RNA, 21 nt, synthetic construct
  source 1..21: mol_type = other RNA
atggggagctggatttccagt

SEQ ID NO: 5221 - RNA, 21 nt, synthetic construct
  source 1..21: mol_type = other RNA
atggtggcatactccgtctgc

SEQ ID NO: 5222 - RNA, 21 nt, synthetic construct
  source 1..21: mol_type = other RNA
attccgctaggaaagacaatg

SEQ ID NO: 5223 - RNA, 21 nt, synthetic construct
  source 1..21: mol_type = other RNA
attgtctttcctagcggaatg

SEQ ID NO: 5224 - RNA, 21 nt, synthetic construct
  source 1..21: mol_type = other RNA
atttccagtggcgagagaaga

SEQ ID NO: 5225 - RNA, 21 nt, synthetic construct
  source 1..21: mol_type = other RNA
caaagaaggaggacccctcag

SEQ ID NO: 5226 - RNA, 21 nt, synthetic construct
  source 1..21: mol_type = other RNA
caagagcagtgtccatcctca

SEQ ID NO: 5227 - RNA, 21 nt, synthetic construct
  source 1..21: mol_type = other RNA
caaggaagccggtcagagggg

SEQ ID NO: 5228 - RNA, 21 nt, synthetic construct
  source 1..21: mol_type = other RNA
caatggtggcatactccgtct

SEQ ID NO: 5229 - RNA, 21 nt, synthetic construct
  source 1..21: mol_type = other RNA
cacagagaacacaggcacggc

SEQ ID NO: 5230 - RNA, 21 nt, synthetic construct
  source 1..21: mol_type = other RNA
cacaggcacggctgaggggtc

SEQ ID NO: 5231 - RNA, 21 nt, synthetic construct
  source 1..21: mol_type = other RNA
caccattgtctttcctagcgg

SEQ ID NO: 5232 - RNA, 21 nt, synthetic construct
  source 1..21: mol_type = other RNA
cacctcatcccccgcccgcag

SEQ ID NO: 5233 - RNA, 21 nt, synthetic construct
  source 1..21: mol_type = other RNA
cacggctgaggggtcctcctt

SEQ ID NO: 5234 - RNA, 21 nt, synthetic construct
  source 1..21: mol_type = other RNA
cacggggggctccggggtctt

SEQ ID NO: 5235 - RNA, 21 nt, synthetic construct
  source 1..21: mol_type = other RNA
cactccgagggccgtcagctg

SEQ ID NO: 5236 - RNA, 21 nt, synthetic construct
  source 1..21: mol_type = other RNA
cactgaggcctgaggatggac

SEQ ID NO: 5237 - RNA, 21 nt, synthetic construct
  source 1..21: mol_type = other RNA
cactgctcttggcccctctga

SEQ ID NO: 5238 - RNA, 21 nt, synthetic construct
  source 1..21: mol_type = other RNA
cactggaaatccagctcccca

SEQ ID NO: 5239 - RNA, 21 nt, synthetic construct
  source 1..21: mol_type = other RNA
cactggtggccaaggaagccg

SEQ ID NO: 5240 - RNA, 21 nt, synthetic construct
  source 1..21: mol_type = other RNA
cagaacactggtggccaagga

SEQ ID NO: 5241 - RNA, 21 nt, synthetic construct
  source 1..21: mol_type = other RNA
cagacggagtatgccaccatt

SEQ ID NO: 5242 - RNA, 21 nt, synthetic construct
  source 1..21: mol_type = other RNA
cagagaacacaggcacggctg

SEQ ID NO: 5243 - RNA, 21 nt, synthetic construct
  source 1..21: mol_type = other RNA
cagaggggccaagagcagtgt

SEQ ID NO: 5244 - RNA, 21 nt, synthetic construct
  source 1..21: mol_type = other RNA
cagccactgaggcctgaggat

SEQ ID NO: 5245 - RNA, 21 nt, synthetic construct
  source 1..21: mol_type = other RNA
cagccgtgcctgtgttctctg

SEQ ID NO: 5246 - RNA, 21 nt, synthetic construct
  source 1..21: mol_type = other RNA
cagctccccatagtccacaga

SEQ ID NO: 5247 - RNA, 21 nt, synthetic construct
  source 1..21: mol_type = other RNA
cagctgacggccctcggagtg

SEQ ID NO: 5248 - RNA, 21 nt, synthetic construct
  source 1..21: mol_type = other RNA
caggcacggctgaggggtcct

SEQ ID NO: 5249 - RNA, 21 nt, synthetic construct
  source 1..21: mol_type = other RNA
caggcctcagtggctgggcac

SEQ ID NO: 5250 - RNA, 21 nt, synthetic construct
  source 1..21: mol_type = other RNA
cagggacacagggcacggggg

SEQ ID NO: 5251 - RNA, 21 nt, synthetic construct
  source 1..21: mol_type = other RNA
caggggctcagctgacggccc

SEQ ID NO: 5252 - RNA, 21 nt, synthetic construct
  source 1..21: mol_type = other RNA
cagtggcgagagaagaccccg

SEQ ID NO: 5253 - RNA, 21 nt, synthetic construct
  source 1..21: mol_type = other RNA
cagtggctgggcactccgagg

SEQ ID NO: 5254 - RNA, 21 nt, synthetic construct
  source 1..21: mol_type = other RNA
cagtgtccatcctcaggcctc

SEQ ID NO: 5255 - RNA, 21 nt, synthetic construct
  source 1..21: mol_type = other RNA
catactccgtctgctcaggga

SEQ ID NO: 5256 - RNA, 21 nt, synthetic construct
  source 1..21: mol_type = other RNA
catagtccacagagaacacag

SEQ ID NO: 5257 - RNA, 21 nt, synthetic construct
  source 1..21: mol_type = other RNA
catcctcaggcctcagtggct

SEQ ID NO: 5258 - RNA, 21 nt, synthetic construct
  source 1..21: mol_type = other RNA
cattccgctaggaaagacaat

SEQ ID NO: 5259 - RNA, 21 nt, synthetic construct
  source 1..21: mol_type = other RNA
cattgtctttcctagcggaat

SEQ ID NO: 5260 - RNA, 21 nt, synthetic construct
  source 1..21: mol_type = other RNA
ccaagagcagtgtccatcctc

SEQ ID NO: 5261 - RNA, 21 nt, synthetic construct
  source 1..21: mol_type = other RNA
ccaaggaagccggtcagaggg

SEQ ID NO: 5262 - RNA, 21 nt, synthetic construct
  source 1..21: mol_type = other RNA
ccacagagaacacaggcacgg

SEQ ID NO: 5263 - RNA, 21 nt, synthetic construct
  source 1..21: mol_type = other RNA
ccaccattgtctttcctagcg

SEQ ID NO: 5264 - RNA, 21 nt, synthetic construct
  source 1..21: mol_type = other RNA
ccactgaggcctgaggatgga

SEQ ID NO: 5265 - RNA, 21 nt, synthetic construct
  source 1..21: mol_type = other RNA
ccactggaaatccagctcccc

SEQ ID NO: 5266 - RNA, 21 nt, synthetic construct
  source 1..21: mol_type = other RNA
ccagccactgaggcctgagga

SEQ ID NO: 5267 - RNA, 21 nt, synthetic construct
  source 1..21: mol_type = other RNA
ccagctccccatagtccacag

SEQ ID NO: 5268 - RNA, 21 nt, synthetic construct
  source 1..21: mol_type = other RNA
ccagtggcgagagaagacccc

SEQ ID NO: 5269 - RNA, 21 nt, synthetic construct
  source 1..21: mol_type = other RNA
ccatagtccacagagaacaca

SEQ ID NO: 5270 - RNA, 21 nt, synthetic construct
  source 1..21: mol_type = other RNA
ccatcctcaggcctcagtggc

SEQ ID NO: 5271 - RNA, 21 nt, synthetic construct
  source 1..21: mol_type = other RNA
ccattccgctaggaaagacaa

SEQ ID NO: 5272 - RNA, 21 nt, synthetic construct
  source 1..21: mol_type = other RNA
ccattgtctttcctagcggaa

SEQ ID NO: 5273 - RNA, 21 nt, synthetic construct
  source 1..21: mol_type = other RNA
cccagccactgaggcctgagg

SEQ ID NO: 5274 - RNA, 21 nt, synthetic construct
  source 1..21: mol_type = other RNA
cccatagtccacagagaacac

SEQ ID NO: 5275 - RNA, 21 nt, synthetic construct
  source 1..21: mol_type = other RNA
cccattccgctaggaaagaca

SEQ ID NO: 5276 - RNA, 21 nt, synthetic construct
  source 1..21: mol_type = other RNA
ccccatagtccacagagaaca

SEQ ID NO: 5277 - RNA, 21 nt, synthetic construct
  source 1..21: mol_type = other RNA
ccccccgtgccctgtgtccct

SEQ ID NO: 5278 - RNA, 21 nt, synthetic construct
  source 1..21: mol_type = other RNA
cccccgtgccctgtgtccctg

SEQ ID NO: 5279 - RNA, 21 nt, synthetic construct
  source 1..21: mol_type = other RNA
ccccgtgccctgtgtccctga

SEQ ID NO: 5280 - RNA, 21 nt, synthetic construct
  source 1..21: mol_type = other RNA
cccctcagccgtgcctgtgtt

SEQ ID NO: 5281 - RNA, 21 nt, synthetic construct
  source 1..21: mol_type = other RNA
cccctctgaccggcttccttg

SEQ ID NO: 5282 - RNA, 21 nt, synthetic construct
  source 1..21: mol_type = other RNA
cccgcaggggctcagctgacg

SEQ ID NO: 5283 - RNA, 21 nt, synthetic construct
  source 1..21: mol_type = other RNA
cccgtgccctgtgtccctgag

SEQ ID NO: 5284 - RNA, 21 nt, synthetic construct
  source 1..21: mol_type = other RNA
ccctcagccgtgcctgtgttc

SEQ ID NO: 5285 - RNA, 21 nt, synthetic construct
  source 1..21: mol_type = other RNA
ccctcggagtgcccagccact

SEQ ID NO: 5286 - RNA, 21 nt, synthetic construct
  source 1..21: mol_type = other RNA
ccctctccctttctcctcaaa

SEQ ID NO: 5287 - RNA, 21 nt, synthetic construct
  source 1..21: mol_type = other RNA
ccctctgaccggcttccttgg

SEQ ID NO: 5288 - RNA, 21 nt, synthetic construct
  source 1..21: mol_type = other RNA
ccctgagcagacggagtatgc

SEQ ID NO: 5289 - RNA, 21 nt, synthetic construct
  source 1..21: mol_type = other RNA
ccctgtgtccctgagcagacg

SEQ ID NO: 5290 - RNA, 21 nt, synthetic construct
  source 1..21: mol_type = other RNA
ccctttctcctcaaagaagga

SEQ ID NO: 5291 - RNA, 21 nt, synthetic construct
  source 1..21: mol_type = other RNA
ccgagggccgtcagctgagcc

SEQ ID NO: 5292 - RNA, 21 nt, synthetic construct
  source 1..21: mol_type = other RNA
ccgcaggggctcagctgacgg

SEQ ID NO: 5293 - RNA, 21 nt, synthetic construct
  source 1..21: mol_type = other RNA
ccgctaggaaagacaatggtg

SEQ ID NO: 5294 - RNA, 21 nt, synthetic construct
  source 1..21: mol_type = other RNA
ccggcttccttggccaccagt

SEQ ID NO: 5295 - RNA, 21 nt, synthetic construct
  source 1..21: mol_type = other RNA
ccggggtcttctctcgccact

SEQ ID NO: 5296 - RNA, 21 nt, synthetic construct
  source 1..21: mol_type = other RNA
ccggtcagaggggccaagagc

SEQ ID NO: 5297 - RNA, 21 nt, synthetic construct
  source 1..21: mol_type = other RNA
ccgtcagctgagcccctgcgg

SEQ ID NO: 5298 - RNA, 21 nt, synthetic construct
  source 1..21: mol_type = other RNA
ccgtctgctcagggacacagg

SEQ ID NO: 5299 - RNA, 21 nt, synthetic construct
  source 1..21: mol_type = other RNA
ccgtgccctgtgtccctgagc

SEQ ID NO: 5300 - RNA, 21 nt, synthetic construct
  source 1..21: mol_type = other RNA
ccgtgcctgtgttctctgtgg

SEQ ID NO: 5301 - RNA, 21 nt, synthetic construct
  source 1..21: mol_type = other RNA
ccgtggggctgactccctctc

SEQ ID NO: 5302 - RNA, 21 nt, synthetic construct
  source 1..21: mol_type = other RNA
cctagcggaatgggcacctca

SEQ ID NO: 5303 - RNA, 21 nt, synthetic construct
  source 1..21: mol_type = other RNA
cctcaaagaaggaggacccct

SEQ ID NO: 5304 - RNA, 21 nt, synthetic construct
  source 1..21: mol_type = other RNA
cctcagccgtgcctgtgttct

SEQ ID NO: 5305 - RNA, 21 nt, synthetic construct
  source 1..21: mol_type = other RNA
cctcaggcctcagtggctggg

SEQ ID NO: 5306 - RNA, 21 nt, synthetic construct
  source 1..21: mol_type = other RNA
cctcagtggctgggcactccg

SEQ ID NO: 5307 - RNA, 21 nt, synthetic construct
  source 1..21: mol_type = other RNA
cctccttctttgaggagaaag

SEQ ID NO: 5308 - RNA, 21 nt, synthetic construct
  source 1..21: mol_type = other RNA
cctcggagtgcccagccactg

SEQ ID NO: 5309 - RNA, 21 nt, synthetic construct
  source 1..21: mol_type = other RNA
cctctccctttctcctcaaag

SEQ ID NO: 5310 - RNA, 21 nt, synthetic construct
  source 1..21: mol_type = other RNA
cctctgaccggcttccttggc

SEQ ID NO: 5311 - RNA, 21 nt, synthetic construct
  source 1..21: mol_type = other RNA
cctgagcagacggagtatgcc

SEQ ID NO: 5312 - RNA, 21 nt, synthetic construct
  source 1..21: mol_type = other RNA
cctgaggatggacactgctct

SEQ ID NO: 5313 - RNA, 21 nt, synthetic construct
  source 1..21: mol_type = other RNA
cctgcgggcgggggatgaggt

SEQ ID NO: 5314 - RNA, 21 nt, synthetic construct
  source 1..21: mol_type = other RNA
cctgtgtccctgagcagacgg

SEQ ID NO: 5315 - RNA, 21 nt, synthetic construct
  source 1..21: mol_type = other RNA
cctgtgttctctgtggactat

SEQ ID NO: 5316 - RNA, 21 nt, synthetic construct
  source 1..21: mol_type = other RNA
ccttctttgaggagaaaggga

SEQ ID NO: 5317 - RNA, 21 nt, synthetic construct
  source 1..21: mol_type = other RNA
ccttggccaccagtgttctgc

SEQ ID NO: 5318 - RNA, 21 nt, synthetic construct
  source 1..21: mol_type = other RNA
cctttctcctcaaagaaggag

SEQ ID NO: 5319 - RNA, 21 nt, synthetic construct
  source 1..21: mol_type = other RNA
cgagagaagaccccggagccc

SEQ ID NO: 5320 - RNA, 21 nt, synthetic construct
  source 1..21: mol_type = other RNA
cgagggccgtcagctgagccc

SEQ ID NO: 5321 - RNA, 21 nt, synthetic construct
  source 1..21: mol_type = other RNA
cgcaggggctcagctgacggc

SEQ ID NO: 5322 - RNA, 21 nt, synthetic construct
  source 1..21: mol_type = other RNA
cgccactggaaatccagctcc

SEQ ID NO: 5323 - RNA, 21 nt, synthetic construct
  source 1..21: mol_type = other RNA
cgcccgcaggggctcagctga

SEQ ID NO: 5324 - RNA, 21 nt, synthetic construct
  source 1..21: mol_type = other RNA
cgctaggaaagacaatggtgg

SEQ ID NO: 5325 - RNA, 21 nt, synthetic construct
  source 1..21: mol_type = other RNA
cggaatgggcacctcatcccc

SEQ ID NO: 5326 - RNA, 21 nt, synthetic construct
  source 1..21: mol_type = other RNA
cggagtatgccaccattgtct

SEQ ID NO: 5327 - RNA, 21 nt, synthetic construct
  source 1..21: mol_type = other RNA
cggagtgcccagccactgagg

SEQ ID NO: 5328 - RNA, 21 nt, synthetic construct
  source 1..21: mol_type = other RNA
cggctgaggggtcctccttct

SEQ ID NO: 5329 - RNA, 21 nt, synthetic construct
  source 1..21: mol_type = other RNA
cggcttccttggccaccagtg

SEQ ID NO: 5330 - RNA, 21 nt, synthetic construct
  source 1..21: mol_type = other RNA
cgggggatgaggtgcccattc

SEQ ID NO: 5331 - RNA, 21 nt, synthetic construct
  source 1..21: mol_type = other RNA
cggggggctccggggtcttct

SEQ ID NO: 5332 - RNA, 21 nt, synthetic construct
  source 1..21: mol_type = other RNA
cggggtcttctctcgccactg

SEQ ID NO: 5333 - RNA, 21 nt, synthetic construct
  source 1..21: mol_type = other RNA
cggtcagaggggccaagagca

SEQ ID NO: 5334 - RNA, 21 nt, synthetic construct
  source 1..21: mol_type = other RNA
cgtcagctgagcccctgcggg

SEQ ID NO: 5335 - RNA, 21 nt, synthetic construct
  source 1..21: mol_type = other RNA
cgtctgctcagggacacaggg

SEQ ID NO: 5336 - RNA, 21 nt, synthetic construct
  source 1..21: mol_type = other RNA
cgtgccctgtgtccctgagca

SEQ ID NO: 5337 - RNA, 21 nt, synthetic construct
  source 1..21: mol_type = other RNA
cgtgcctgtgttctctgtgga

SEQ ID NO: 5338 - RNA, 21 nt, synthetic construct
  source 1..21: mol_type = other RNA
cgtggggctgactccctctcc

SEQ ID NO: 5339 - RNA, 21 nt, synthetic construct
  source 1..21: mol_type = other RNA
ctagcggaatgggcacctcat

SEQ ID NO: 5340 - RNA, 21 nt, synthetic construct
  source 1..21: mol_type = other RNA
ctaggaaagacaatggtggca

SEQ ID NO: 5341 - RNA, 21 nt, synthetic construct
  source 1..21: mol_type = other RNA
ctatggggagctggatttcca

SEQ ID NO: 5342 - RNA, 21 nt, synthetic construct
  source 1..21: mol_type = other RNA
ctcaaagaaggaggacccctc

SEQ ID NO: 5343 - RNA, 21 nt, synthetic construct
  source 1..21: mol_type = other RNA
ctcagccgtgcctgtgttctc

SEQ ID NO: 5344 - RNA, 21 nt, synthetic construct
  source 1..21: mol_type = other RNA
ctcagctgacggccctcggag

SEQ ID NO: 5345 - RNA, 21 nt, synthetic construct
  source 1..21: mol_type = other RNA
ctcaggcctcagtggctgggc

SEQ ID NO: 5346 - RNA, 21 nt, synthetic construct
  source 1..21: mol_type = other RNA
ctcagggacacagggcacggg

SEQ ID NO: 5347 - RNA, 21 nt, synthetic construct
  source 1..21: mol_type = other RNA
ctcagtggctgggcactccga

SEQ ID NO: 5348 - RNA, 21 nt, synthetic construct
  source 1..21: mol_type = other RNA
ctccccatagtccacagagaa

SEQ ID NO: 5349 - RNA, 21 nt, synthetic construct
  source 1..21: mol_type = other RNA
ctccctctccctttctcctca

SEQ ID NO: 5350 - RNA, 21 nt, synthetic construct
  source 1..21: mol_type = other RNA
ctccctttctcctcaaagaag

SEQ ID NO: 5351 - RNA, 21 nt, synthetic construct
  source 1..21: mol_type = other RNA
ctccgagggccgtcagctgag

SEQ ID NO: 5352 - RNA, 21 nt, synthetic construct
  source 1..21: mol_type = other RNA
ctccggggtcttctctcgcca

SEQ ID NO: 5353 - RNA, 21 nt, synthetic construct
  source 1..21: mol_type = other RNA
ctccgtctgctcagggacaca

SEQ ID NO: 5354 - RNA, 21 nt, synthetic construct
  source 1..21: mol_type = other RNA
ctcctcaaagaaggaggaccc

SEQ ID NO: 5355 - RNA, 21 nt, synthetic construct
  source 1..21: mol_type = other RNA
ctccttctttgaggagaaagg

SEQ ID NO: 5356 - RNA, 21 nt, synthetic construct
  source 1..21: mol_type = other RNA
ctcgccactggaaatccagct

SEQ ID NO: 5357 - RNA, 21 nt, synthetic construct
  source 1..21: mol_type = other RNA
ctcggagtgcccagccactga

SEQ ID NO: 5358 - RNA, 21 nt, synthetic construct
  source 1..21: mol_type = other RNA
ctctccctttctcctcaaaga

SEQ ID NO: 5359 - RNA, 21 nt, synthetic construct
  source 1..21: mol_type = other RNA
ctctcgccactggaaatccag

SEQ ID NO: 5360 - RNA, 21 nt, synthetic construct
  source 1..21: mol_type = other RNA
ctctgaccggcttccttggcc

SEQ ID NO: 5361 - RNA, 21 nt, synthetic construct
  source 1..21: mol_type = other RNA
ctctgtggactatggggagct

SEQ ID NO: 5362 - RNA, 21 nt, synthetic construct
  source 1..21: mol_type = other RNA
ctcttggcccctctgaccggc

SEQ ID NO: 5363 - RNA, 21 nt, synthetic construct
  source 1..21: mol_type = other RNA
ctgaccggcttccttggccac

SEQ ID NO: 5364 - RNA, 21 nt, synthetic construct
  source 1..21: mol_type = other RNA
ctgacggccctcggagtgccc

SEQ ID NO: 5365 - RNA, 21 nt, synthetic construct
  source 1..21: mol_type = other RNA
ctgactccctctccctttctc

SEQ ID NO: 5366 - RNA, 21 nt, synthetic construct
  source 1..21: mol_type = other RNA
ctgagcagacggagtatgcca

SEQ ID NO: 5367 - RNA, 21 nt, synthetic construct
  source 1..21: mol_type = other RNA
ctgaggatggacactgctctt

SEQ ID NO: 5368 - RNA, 21 nt, synthetic construct
  source 1..21: mol_type = other RNA
ctgaggcctgaggatggacac

SEQ ID NO: 5369 - RNA, 21 nt, synthetic construct
  source 1..21: mol_type = other RNA
ctgaggggtcctccttctttg

SEQ ID NO: 5370 - RNA, 21 nt, synthetic construct
  source 1..21: mol_type = other RNA
ctgcagaacactggtggccaa

SEQ ID NO: 5371 - RNA, 21 nt, synthetic construct
  source 1..21: mol_type = other RNA
ctgcgggcgggggatgaggtg

SEQ ID NO: 5372 - RNA, 21 nt, synthetic construct
  source 1..21: mol_type = other RNA
ctgctcagggacacagggcac

SEQ ID NO: 5373 - RNA, 21 nt, synthetic construct
  source 1..21: mol_type = other RNA
ctgctcttggcccctctgacc

SEQ ID NO: 5374 - RNA, 21 nt, synthetic construct
  source 1..21: mol_type = other RNA
ctggaaatccagctccccata

SEQ ID NO: 5375 - RNA, 21 nt, synthetic construct
  source 1..21: mol_type = other RNA
ctggatttccagtggcgagag

SEQ ID NO: 5376 - RNA, 21 nt, synthetic construct
  source 1..21: mol_type = other RNA
ctgggcactccgagggccgtc

SEQ ID NO: 5377 - RNA, 21 nt, synthetic construct
  source 1..21: mol_type = other RNA
ctggtggccaaggaagccggt

SEQ ID NO: 5378 - RNA, 21 nt, synthetic construct
  source 1..21: mol_type = other RNA
ctgtggactatggggagctgg

SEQ ID NO: 5379 - RNA, 21 nt, synthetic construct
  source 1..21: mol_type = other RNA
ctgtgtccctgagcagacgga

SEQ ID NO: 5380 - RNA, 21 nt, synthetic construct
  source 1..21: mol_type = other RNA
ctgtgttctctgtggactatg

SEQ ID NO: 5381 - RNA, 21 nt, synthetic construct
  source 1..21: mol_type = other RNA
cttccttggccaccagtgttc

SEQ ID NO: 5382 - RNA, 21 nt, synthetic construct
  source 1..21: mol_type = other RNA
cttctctcgccactggaaatc

SEQ ID NO: 5383 - RNA, 21 nt, synthetic construct
  source 1..21: mol_type = other RNA
cttctttgaggagaaagggag

SEQ ID NO: 5384 - RNA, 21 nt, synthetic construct
  source 1..21: mol_type = other RNA
cttggccaccagtgttctgca

SEQ ID NO: 5385 - RNA, 21 nt, synthetic construct
  source 1..21: mol_type = other RNA
cttggcccctctgaccggctt

SEQ ID NO: 5386 - RNA, 21 nt, synthetic construct
  source 1..21: mol_type = other RNA
ctttcctagcggaatgggcac

SEQ ID NO: 5387 - RNA, 21 nt, synthetic construct
  source 1..21: mol_type = other RNA
ctttctcctcaaagaaggagg

SEQ ID NO: 5388 - RNA, 21 nt, synthetic construct
  source 1..21: mol_type = other RNA
ctttgaggagaaagggagagg

SEQ ID NO: 5389 - RNA, 21 nt, synthetic construct
  source 1..21: mol_type = other RNA
gaaagacaatggtggcatact

SEQ ID NO: 5390 - RNA, 21 nt, synthetic construct
  source 1..21: mol_type = other RNA
gaaagggagagggagtcagcc

SEQ ID NO: 5391 - RNA, 21 nt, synthetic construct
  source 1..21: mol_type = other RNA
gaaatccagctccccatagtc

SEQ ID NO: 5392 - RNA, 21 nt, synthetic construct
  source 1..21: mol_type = other RNA
gaacacaggcacggctgaggg

SEQ ID NO: 5393 - RNA, 21 nt, synthetic construct
  source 1..21: mol_type = other RNA
gaacactggtggccaaggaag

SEQ ID NO: 5394 - RNA, 21 nt, synthetic construct
  source 1..21: mol_type = other RNA
gaagaccccggagccccccgt

SEQ ID NO: 5395 - RNA, 21 nt, synthetic construct
  source 1..21: mol_type = other RNA
gaagccggtcagaggggccaa

SEQ ID NO: 5396 - RNA, 21 nt, synthetic construct
  source 1..21: mol_type = other RNA
gaaggaggacccctcagccgt

SEQ ID NO: 5397 - RNA, 21 nt, synthetic construct
  source 1..21: mol_type = other RNA
gaatgggcacctcatcccccg

SEQ ID NO: 5398 - RNA, 21 nt, synthetic construct
  source 1..21: mol_type = other RNA
gacaatggtggcatactccgt

SEQ ID NO: 5399 - RNA, 21 nt, synthetic construct
  source 1..21: mol_type = other RNA
gacacagggcacggggggctc

SEQ ID NO: 5400 - RNA, 21 nt, synthetic construct
  source 1..21: mol_type = other RNA
gacactgctcttggcccctct

SEQ ID NO: 5401 - RNA, 21 nt, synthetic construct
  source 1..21: mol_type = other RNA
gacccctcagccgtgcctgtg

SEQ ID NO: 5402 - RNA, 21 nt, synthetic construct
  source 1..21: mol_type = other RNA
gaccggcttccttggccacca

SEQ ID NO: 5403 - RNA, 21 nt, synthetic construct
  source 1..21: mol_type = other RNA
gacggagtatgccaccattgt

SEQ ID NO: 5404 - RNA, 21 nt, synthetic construct
  source 1..21: mol_type = other RNA
gacggccctcggagtgcccag

SEQ ID NO: 5405 - RNA, 21 nt, synthetic construct
  source 1..21: mol_type = other RNA
gactatggggagctggatttc

SEQ ID NO: 5406 - RNA, 21 nt, synthetic construct
  source 1..21: mol_type = other RNA
gactccctctccctttctcct

SEQ ID NO: 5407 - RNA, 21 nt, synthetic construct
  source 1..21: mol_type = other RNA
gagaaagggagagggagtcag

SEQ ID NO: 5408 - RNA, 21 nt, synthetic construct
  source 1..21: mol_type = other RNA
gagaacacaggcacggctgag

SEQ ID NO: 5409 - RNA, 21 nt, synthetic construct
  source 1..21: mol_type = other RNA
gagaagaccccggagcccccc

SEQ ID NO: 5410 - RNA, 21 nt, synthetic construct
  source 1..21: mol_type = other RNA
gagagaagaccccggagcccc

SEQ ID NO: 5411 - RNA, 21 nt, synthetic construct
  source 1..21: mol_type = other RNA
gagcagacggagtatgccacc

SEQ ID NO: 5412 - RNA, 21 nt, synthetic construct
  source 1..21: mol_type = other RNA
gagcagtgtccatcctcaggc

SEQ ID NO: 5413 - RNA, 21 nt, synthetic construct
  source 1..21: mol_type = other RNA
gagccccccgtgccctgtgtc

SEQ ID NO: 5414 - RNA, 21 nt, synthetic construct
  source 1..21: mol_type = other RNA
gagctggatttccagtggcga

SEQ ID NO: 5415 - RNA, 21 nt, synthetic construct
  source 1..21: mol_type = other RNA
gaggacccctcagccgtgcct

SEQ ID NO: 5416 - RNA, 21 nt, synthetic construct
  source 1..21: mol_type = other RNA
gaggagaaagggagagggagt

SEQ ID NO: 5417 - RNA, 21 nt, synthetic construct
  source 1..21: mol_type = other RNA
gaggatggacactgctcttgg

SEQ ID NO: 5418 - RNA, 21 nt, synthetic construct
  source 1..21: mol_type = other RNA
gaggcctgaggatggacactg

SEQ ID NO: 5419 - RNA, 21 nt, synthetic construct
  source 1..21: mol_type = other RNA
gagggccgtcagctgagcccc

SEQ ID NO: 5420 - RNA, 21 nt, synthetic construct
  source 1..21: mol_type = other RNA
gaggggccaagagcagtgtcc

SEQ ID NO: 5421 - RNA, 21 nt, synthetic construct
  source 1..21: mol_type = other RNA
gaggggtcctccttctttgag

SEQ ID NO: 5422 - RNA, 21 nt, synthetic construct
  source 1..21: mol_type = other RNA
gagggtctgcagaacactggt

SEQ ID NO: 5423 - RNA, 21 nt, synthetic construct
  source 1..21: mol_type = other RNA
gaggtgcccattccgctagga

SEQ ID NO: 5424 - RNA, 21 nt, synthetic construct
  source 1..21: mol_type = other RNA
gagtatgccaccattgtcttt

SEQ ID NO: 5425 - RNA, 21 nt, synthetic construct
  source 1..21: mol_type = other RNA
gagtgcccagccactgaggcc

SEQ ID NO: 5426 - RNA, 21 nt, synthetic construct
  source 1..21: mol_type = other RNA
gatgaggtgcccattccgcta

SEQ ID NO: 5427 - RNA, 21 nt, synthetic construct
  source 1..21: mol_type = other RNA
gatggacactgctcttggccc

SEQ ID NO: 5428 - RNA, 21 nt, synthetic construct
  source 1..21: mol_type = other RNA
gatttccagtggcgagagaag

SEQ ID NO: 5429 - RNA, 21 nt, synthetic construct
  source 1..21: mol_type = other RNA
gcacctcatcccccgcccgca

SEQ ID NO: 5430 - RNA, 21 nt, synthetic construct
  source 1..21: mol_type = other RNA
gcacggctgaggggtcctcct

SEQ ID NO: 5431 - RNA, 21 nt, synthetic construct
  source 1..21: mol_type = other RNA
gcactccgagggccgtcagct

SEQ ID NO: 5432 - RNA, 21 nt, synthetic construct
  source 1..21: mol_type = other RNA
gcagaacactggtggccaagg

SEQ ID NO: 5433 - RNA, 21 nt, synthetic construct
  source 1..21: mol_type = other RNA
gcagacggagtatgccaccat

SEQ ID NO: 5434 - RNA, 21 nt, synthetic construct
  source 1..21: mol_type = other RNA
gcaggggctcagctgacggcc

SEQ ID NO: 5435 - RNA, 21 nt, synthetic construct
  source 1..21: mol_type = other RNA
gcagtgtccatcctcaggcct

SEQ ID NO: 5436 - RNA, 21 nt, synthetic construct
  source 1..21: mol_type = other RNA
gcatactccgtctgctcaggg

SEQ ID NO: 5437 - RNA, 21 nt, synthetic construct
  source 1..21: mol_type = other RNA
gccaagagcagtgtccatcct

SEQ ID NO: 5438 - RNA, 21 nt, synthetic construct
  source 1..21: mol_type = other RNA
gccaaggaagccggtcagagg

SEQ ID NO: 5439 - RNA, 21 nt, synthetic construct
  source 1..21: mol_type = other RNA
gccaccattgtctttcctagc

SEQ ID NO: 5440 - RNA, 21 nt, synthetic construct
  source 1..21: mol_type = other RNA
gccactgaggcctgaggatgg

SEQ ID NO: 5441 - RNA, 21 nt, synthetic construct
  source 1..21: mol_type = other RNA
gccactggaaatccagctccc

SEQ ID NO: 5442 - RNA, 21 nt, synthetic construct
  source 1..21: mol_type = other RNA
gcccagccactgaggcctgag

SEQ ID NO: 5443 - RNA, 21 nt, synthetic construct
  source 1..21: mol_type = other RNA
gcccattccgctaggaaagac

SEQ ID NO: 5444 - RNA, 21 nt, synthetic construct
  source 1..21: mol_type = other RNA
gcccctctgaccggcttcctt

SEQ ID NO: 5445 - RNA, 21 nt, synthetic construct
  source 1..21: mol_type = other RNA
gcccgcaggggctcagctgac

SEQ ID NO: 5446 - RNA, 21 nt, synthetic construct
  source 1..21: mol_type = other RNA
gccctcggagtgcccagccac

SEQ ID NO: 5447 - RNA, 21 nt, synthetic construct
  source 1..21: mol_type = other RNA
gccctgtgtccctgagcagac

SEQ ID NO: 5448 - RNA, 21 nt, synthetic construct
  source 1..21: mol_type = other RNA
gccggtcagaggggccaagag

SEQ ID NO: 5449 - RNA, 21 nt, synthetic construct
  source 1..21: mol_type = other RNA
gccgtcagctgagcccctgcg

SEQ ID NO: 5450 - RNA, 21 nt, synthetic construct
  source 1..21: mol_type = other RNA
gccgtgcctgtgttctctgtg

SEQ ID NO: 5451 - RNA, 21 nt, synthetic construct
  source 1..21: mol_type = other RNA
gccgtggggctgactccctct

SEQ ID NO: 5452 - RNA, 21 nt, synthetic construct
  source 1..21: mol_type = other RNA
gcctcagtggctgggcactcc

SEQ ID NO: 5453 - RNA, 21 nt, synthetic construct
  source 1..21: mol_type = other RNA
gcctgaggatggacactgctc

SEQ ID NO: 5454 - RNA, 21 nt, synthetic construct
  source 1..21: mol_type = other RNA
gcctgtgttctctgtggacta

SEQ ID NO: 5455 - RNA, 21 nt, synthetic construct
  source 1..21: mol_type = other RNA
gcgagagaagaccccggagcc

SEQ ID NO: 5456 - RNA, 21 nt, synthetic construct
  source 1..21: mol_type = other RNA
gcggaatgggcacctcatccc

SEQ ID NO: 5457 - RNA, 21 nt, synthetic construct
  source 1..21: mol_type = other RNA
gcgggggatgaggtgcccatt

SEQ ID NO: 5458 - RNA, 21 nt, synthetic construct
  source 1..21: mol_type = other RNA
gctaggaaagacaatggtggc

SEQ ID NO: 5459 - RNA, 21 nt, synthetic construct
  source 1..21: mol_type = other RNA
gctcagctgacggccctcgga

SEQ ID NO: 5460 - RNA, 21 nt, synthetic construct
  source 1..21: mol_type = other RNA
gctcagggacacagggcacgg

SEQ ID NO: 5461 - RNA, 21 nt, synthetic construct
  source 1..21: mol_type = other RNA
gctccccatagtccacagaga

SEQ ID NO: 5462 - RNA, 21 nt, synthetic construct
  source 1..21: mol_type = other RNA
gctccggggtcttctctcgcc

SEQ ID NO: 5463 - RNA, 21 nt, synthetic construct
  source 1..21: mol_type = other RNA
gctcttggcccctctgaccgg

SEQ ID NO: 5464 - RNA, 21 nt, synthetic construct
  source 1..21: mol_type = other RNA
gctgacggccctcggagtgcc

SEQ ID NO: 5465 - RNA, 21 nt, synthetic construct
  source 1..21: mol_type = other RNA
gctgactccctctccctttct

SEQ ID NO: 5466 - RNA, 21 nt, synthetic construct
  source 1..21: mol_type = other RNA
gctgaggggtcctccttcttt

SEQ ID NO: 5467 - RNA, 21 nt, synthetic construct
  source 1..21: mol_type = other RNA
gctggatttccagtggcgaga

SEQ ID NO: 5468 - RNA, 21 nt, synthetic construct
  source 1..21: mol_type = other RNA
gctgggcactccgagggccgt

SEQ ID NO: 5469 - RNA, 21 nt, synthetic construct
  source 1..21: mol_type = other RNA
gcttccttggccaccagtgtt

SEQ ID NO: 5470 - RNA, 21 nt, synthetic construct
  source 1..21: mol_type = other RNA
ggaaagacaatggtggcatac

SEQ ID NO: 5471 - RNA, 21 nt, synthetic construct
  source 1..21: mol_type = other RNA
ggaaatccagctccccatagt

SEQ ID NO: 5472 - RNA, 21 nt, synthetic construct
  source 1..21: mol_type = other RNA
ggaagccggtcagaggggcca

SEQ ID NO: 5473 - RNA, 21 nt, synthetic construct
  source 1..21: mol_type = other RNA
ggaatgggcacctcatccccc

SEQ ID NO: 5474 - RNA, 21 nt, synthetic construct
  source 1..21: mol_type = other RNA
ggacacagggcacggggggct

SEQ ID NO: 5475 - RNA, 21 nt, synthetic construct
  source 1..21: mol_type = other RNA
ggacactgctcttggcccctc

SEQ ID NO: 5476 - RNA, 21 nt, synthetic construct
  source 1..21: mol_type = other RNA
ggacccctcagccgtgcctgt

SEQ ID NO: 5477 - RNA, 21 nt, synthetic construct
  source 1..21: mol_type = other RNA
ggactatggggagctggattt

SEQ ID NO: 5478 - RNA, 21 nt, synthetic construct
  source 1..21: mol_type = other RNA
ggagaaagggagagggagtca

SEQ ID NO: 5479 - RNA, 21 nt, synthetic construct
  source 1..21: mol_type = other RNA
ggagccccccgtgccctgtgt

SEQ ID NO: 5480 - RNA, 21 nt, synthetic construct
  source 1..21: mol_type = other RNA
ggagctggatttccagtggcg

SEQ ID NO: 5481 - RNA, 21 nt, synthetic construct
  source 1..21: mol_type = other RNA
ggaggacccctcagccgtgcc

SEQ ID NO: 5482 - RNA, 21 nt, synthetic construct
  source 1..21: mol_type = other RNA
ggagggtctgcagaacactgg

SEQ ID NO: 5483 - RNA, 21 nt, synthetic construct
  source 1..21: mol_type = other RNA
ggagtatgccaccattgtctt

SEQ ID NO: 5484 - RNA, 21 nt, synthetic construct
  source 1..21: mol_type = other RNA
ggagtgcccagccactgaggc

SEQ ID NO: 5485 - RNA, 21 nt, synthetic construct
  source 1..21: mol_type = other RNA
ggatgaggtgcccattccgct

SEQ ID NO: 5486 - RNA, 21 nt, synthetic construct
  source 1..21: mol_type = other RNA
ggatggacactgctcttggcc

SEQ ID NO: 5487 - RNA, 21 nt, synthetic construct
  source 1..21: mol_type = other RNA
ggatttccagtggcgagagaa

SEQ ID NO: 5488 - RNA, 21 nt, synthetic construct
  source 1..21: mol_type = other RNA
ggcacggctgaggggtcctcc

SEQ ID NO: 5489 - RNA, 21 nt, synthetic construct
  source 1..21: mol_type = other RNA
ggcactccgagggccgtcagc

SEQ ID NO: 5490 - RNA, 21 nt, synthetic construct
  source 1..21: mol_type = other RNA
ggcatactccgtctgctcagg

SEQ ID NO: 5491 - RNA, 21 nt, synthetic construct
  source 1..21: mol_type = other RNA
ggccaagagcagtgtccatcc

SEQ ID NO: 5492 - RNA, 21 nt, synthetic construct
  source 1..21: mol_type = other RNA
ggccaaggaagccggtcagag

SEQ ID NO: 5493 - RNA, 21 nt, synthetic construct
  source 1..21: mol_type = other RNA
ggcccctctgaccggcttcct

SEQ ID NO: 5494 - RNA, 21 nt, synthetic construct
  source 1..21: mol_type = other RNA
ggccctcggagtgcccagcca

SEQ ID NO: 5495 - RNA, 21 nt, synthetic construct
  source 1..21: mol_type = other RNA
ggccgtcagctgagcccctgc

SEQ ID NO: 5496 - RNA, 21 nt, synthetic construct
  source 1..21: mol_type = other RNA
ggccgtggggctgactccctc

SEQ ID NO: 5497 - RNA, 21 nt, synthetic construct
  source 1..21: mol_type = other RNA
ggcctcagtggctgggcactc

SEQ ID NO: 5498 - RNA, 21 nt, synthetic construct
  source 1..21: mol_type = other RNA
ggcctgaggatggacactgct

SEQ ID NO: 5499 - RNA, 21 nt, synthetic construct
  source 1..21: mol_type = other RNA
ggcgagagaagaccccggagc

SEQ ID NO: 5500 - RNA, 21 nt, synthetic construct
  source 1..21: mol_type = other RNA
ggcgggggatgaggtgcccat

SEQ ID NO: 5501 - RNA, 21 nt, synthetic construct
  source 1..21: mol_type = other RNA
ggctcagctgacggccctcgg

SEQ ID NO: 5502 - RNA, 21 nt, synthetic construct
  source 1..21: mol_type = other RNA
ggctccggggtcttctctcgc

SEQ ID NO: 5503 - RNA, 21 nt, synthetic construct
  source 1..21: mol_type = other RNA
ggctgactccctctccctttc

SEQ ID NO: 5504 - RNA, 21 nt, synthetic construct
  source 1..21: mol_type = other RNA
ggctgaggggtcctccttctt

SEQ ID NO: 5505 - RNA, 21 nt, synthetic construct
  source 1..21: mol_type = other RNA
ggcttccttggccaccagtgt

SEQ ID NO: 5506 - RNA, 21 nt, synthetic construct
  source 1..21: mol_type = other RNA
gggagctggatttccagtggc

SEQ ID NO: 5507 - RNA, 21 nt, synthetic construct
  source 1..21: mol_type = other RNA
gggatgaggtgcccattccgc

SEQ ID NO: 5508 - RNA, 21 nt, synthetic construct
  source 1..21: mol_type = other RNA
gggcactccgagggccgtcag

SEQ ID NO: 5509 - RNA, 21 nt, synthetic construct
  source 1..21: mol_type = other RNA
gggccaagagcagtgtccatc

SEQ ID NO: 5510 - RNA, 21 nt, synthetic construct
  source 1..21: mol_type = other RNA
gggccgtcagctgagcccctg

SEQ ID NO: 5511 - RNA, 21 nt, synthetic construct
  source 1..21: mol_type = other RNA
gggcgggggatgaggtgccca

SEQ ID NO: 5512 - RNA, 21 nt, synthetic construct
  source 1..21: mol_type = other RNA
gggctcagctgacggccctcg

SEQ ID NO: 5513 - RNA, 21 nt, synthetic construct
  source 1..21: mol_type = other RNA
gggctccggggtcttctctcg

SEQ ID NO: 5514 - RNA, 21 nt, synthetic construct
  source 1..21: mol_type = other RNA
gggctgactccctctcccttt

SEQ ID NO: 5515 - RNA, 21 nt, synthetic construct
  source 1..21: mol_type = other RNA
ggggagctggatttccagtgg

SEQ ID NO: 5516 - RNA, 21 nt, synthetic construct
  source 1..21: mol_type = other RNA
ggggatgaggtgcccattccg

SEQ ID NO: 5517 - RNA, 21 nt, synthetic construct
  source 1..21: mol_type = other RNA
ggggccaagagcagtgtccat

SEQ ID NO: 5518 - RNA, 21 nt, synthetic construct
  source 1..21: mol_type = other RNA
ggggctcagctgacggccctc

SEQ ID NO: 5519 - RNA, 21 nt, synthetic construct
  source 1..21: mol_type = other RNA
ggggctccggggtcttctctc

SEQ ID NO: 5520 - RNA, 21 nt, synthetic construct
  source 1..21: mol_type = other RNA
ggggctgactccctctccctt

SEQ ID NO: 5521 - RNA, 21 nt, synthetic construct
  source 1..21: mol_type = other RNA
gggggatgaggtgcccattcc

SEQ ID NO: 5522 - RNA, 21 nt, synthetic construct
  source 1..21: mol_type = other RNA
gggggctccggggtcttctct

SEQ ID NO: 5523 - RNA, 21 nt, synthetic construct
  source 1..21: mol_type = other RNA
ggggggctccggggtcttctc

SEQ ID NO: 5524 - RNA, 21 nt, synthetic construct
  source 1..21: mol_type = other RNA
ggggtcctccttctttgagga

SEQ ID NO: 5525 - RNA, 21 nt, synthetic construct
  source 1..21: mol_type = other RNA
ggggtcttctctcgccactgg

SEQ ID NO: 5526 - RNA, 21 nt, synthetic construct
  source 1..21: mol_type = other RNA
gggtcctccttctttgaggag

SEQ ID NO: 5527 - RNA, 21 nt, synthetic construct
  source 1..21: mol_type = other RNA
gggtctgcagaacactggtgg

SEQ ID NO: 5528 - RNA, 21 nt, synthetic construct
  source 1..21: mol_type = other RNA
gggtcttctctcgccactgga

SEQ ID NO: 5529 - RNA, 21 nt, synthetic construct
  source 1..21: mol_type = other RNA
ggtcagaggggccaagagcag

SEQ ID NO: 5530 - RNA, 21 nt, synthetic construct
  source 1..21: mol_type = other RNA
ggtcctccttctttgaggaga

SEQ ID NO: 5531 - RNA, 21 nt, synthetic construct
  source 1..21: mol_type = other RNA
ggtctgcagaacactggtggc

SEQ ID NO: 5532 - RNA, 21 nt, synthetic construct
  source 1..21: mol_type = other RNA
ggtcttctctcgccactggaa

SEQ ID NO: 5533 - RNA, 21 nt, synthetic construct
  source 1..21: mol_type = other RNA
ggtgcccattccgctaggaaa

SEQ ID NO: 5534 - RNA, 21 nt, synthetic construct
  source 1..21: mol_type = other RNA
ggtggcatactccgtctgctc

SEQ ID NO: 5535 - RNA, 21 nt, synthetic construct
  source 1..21: mol_type = other RNA
ggtggccaaggaagccggtca

SEQ ID NO: 5536 - RNA, 21 nt, synthetic construct
  source 1..21: mol_type = other RNA
gtatgccaccattgtctttcc

SEQ ID NO: 5537 - RNA, 21 nt, synthetic construct
  source 1..21: mol_type = other RNA
gtcagaggggccaagagcagt

SEQ ID NO: 5538 - RNA, 21 nt, synthetic construct
  source 1..21: mol_type = other RNA
gtcagctgagcccctgcgggc

SEQ ID NO: 5539 - RNA, 21 nt, synthetic construct
  source 1..21: mol_type = other RNA
gtccacagagaacacaggcac

SEQ ID NO: 5540 - RNA, 21 nt, synthetic construct
  source 1..21: mol_type = other RNA
gtccatcctcaggcctcagtg

SEQ ID NO: 5541 - RNA, 21 nt, synthetic construct
  source 1..21: mol_type = other RNA
gtccctgagcagacggagtat

SEQ ID NO: 5542 - RNA, 21 nt, synthetic construct
  source 1..21: mol_type = other RNA
gtcctccttctttgaggagaa

SEQ ID NO: 5543 - RNA, 21 nt, synthetic construct
  source 1..21: mol_type = other RNA
gtctgcagaacactggtggcc

SEQ ID NO: 5544 - RNA, 21 nt, synthetic construct
  source 1..21: mol_type = other RNA
gtctgctcagggacacagggc

SEQ ID NO: 5545 - RNA, 21 nt, synthetic construct
  source 1..21: mol_type = other RNA
gtcttctctcgccactggaaa

SEQ ID NO: 5546 - RNA, 21 nt, synthetic construct
  source 1..21: mol_type = other RNA
gtctttcctagcggaatgggc

SEQ ID NO: 5547 - RNA, 21 nt, synthetic construct
  source 1..21: mol_type = other RNA
gtgcccagccactgaggcctg

SEQ ID NO: 5548 - RNA, 21 nt, synthetic construct
  source 1..21: mol_type = other RNA
gtgcccattccgctaggaaag

SEQ ID NO: 5549 - RNA, 21 nt, synthetic construct
  source 1..21: mol_type = other RNA
gtgccctgtgtccctgagcag

SEQ ID NO: 5550 - RNA, 21 nt, synthetic construct
  source 1..21: mol_type = other RNA
gtgcctgtgttctctgtggac

SEQ ID NO: 5551 - RNA, 21 nt, synthetic construct
  source 1..21: mol_type = other RNA
gtggactatggggagctggat

SEQ ID NO: 5552 - RNA, 21 nt, synthetic construct
  source 1..21: mol_type = other RNA
gtggagggtctgcagaacact

SEQ ID NO: 5553 - RNA, 21 nt, synthetic construct
  source 1..21: mol_type = other RNA
gtggcatactccgtctgctca

SEQ ID NO: 5554 - RNA, 21 nt, synthetic construct
  source 1..21: mol_type = other RNA
gtggccaaggaagccggtcag

SEQ ID NO: 5555 - RNA, 21 nt, synthetic construct
  source 1..21: mol_type = other RNA
gtggcgagagaagaccccgga

SEQ ID NO: 5556 - RNA, 21 nt, synthetic construct
  source 1..21: mol_type = other RNA
gtggctgggcactccgagggc

SEQ ID NO: 5557 - RNA, 21 nt, synthetic construct
  source 1..21: mol_type = other RNA
gtggggctgactccctctccc

SEQ ID NO: 5558 - RNA, 21 nt, synthetic construct
  source 1..21: mol_type = other RNA
gtgtccatcctcaggcctcag

SEQ ID NO: 5559 - RNA, 21 nt, synthetic construct
  source 1..21: mol_type = other RNA
gtgtccctgagcagacggagt

SEQ ID NO: 5560 - RNA, 21 nt, synthetic construct
  source 1..21: mol_type = other RNA
gtgttctctgtggactatggg

SEQ ID NO: 5561 - RNA, 21 nt, synthetic construct
  source 1..21: mol_type = other RNA
gttctctgtggactatgggga

SEQ ID NO: 5562 - RNA, 21 nt, synthetic construct
  source 1..21: mol_type = other RNA
tactccgtctgctcagggaca

SEQ ID NO: 5563 - RNA, 21 nt, synthetic construct
  source 1..21: mol_type = other RNA
tagcggaatgggcacctcatc

SEQ ID NO: 5564 - RNA, 21 nt, synthetic construct
  source 1..21: mol_type = other RNA
taggaaagacaatggtggcat

SEQ ID NO: 5565 - RNA, 21 nt, synthetic construct
  source 1..21: mol_type = other RNA
tagtccacagagaacacaggc

SEQ ID NO: 5566 - RNA, 21 nt, synthetic construct
  source 1..21: mol_type = other RNA
tatgccaccattgtctttcct

SEQ ID NO: 5567 - RNA, 21 nt, synthetic construct
  source 1..21: mol_type = other RNA
tatggggagctggatttccag

SEQ ID NO: 5568 - RNA, 21 nt, synthetic construct
  source 1..21: mol_type = other RNA
tcaaagaaggaggacccctca

SEQ ID NO: 5569 - RNA, 21 nt, synthetic construct
  source 1..21: mol_type = other RNA
tcagaggggccaagagcagtg

SEQ ID NO: 5570 - RNA, 21 nt, synthetic construct
  source 1..21: mol_type = other RNA
tcagccgtgcctgtgttctct

SEQ ID NO: 5571 - RNA, 21 nt, synthetic construct
  source 1..21: mol_type = other RNA
tcagctgacggccctcggagt

SEQ ID NO: 5572 - RNA, 21 nt, synthetic construct
  source 1..21: mol_type = other RNA
tcagctgagcccctgcgggcg

SEQ ID NO: 5573 - RNA, 21 nt, synthetic construct
  source 1..21: mol_type = other RNA
tcaggcctcagtggctgggca

SEQ ID NO: 5574 - RNA, 21 nt, synthetic construct
  source 1..21: mol_type = other RNA
tcagggacacagggcacgggg

SEQ ID NO: 5575 - RNA, 21 nt, synthetic construct
  source 1..21: mol_type = other RNA
tcagtggctgggcactccgag

SEQ ID NO: 5576 - RNA, 21 nt, synthetic construct
  source 1..21: mol_type = other RNA
tccacagagaacacaggcacg

SEQ ID NO: 5577 - RNA, 21 nt, synthetic construct
  source 1..21: mol_type = other RNA
tccagctccccatagtccaca

SEQ ID NO: 5578 - RNA, 21 nt, synthetic construct
  source 1..21: mol_type = other RNA
tccagtggcgagagaagaccc

SEQ ID NO: 5579 - RNA, 21 nt, synthetic construct
  source 1..21: mol_type = other RNA
tccatcctcaggcctcagtgg

SEQ ID NO: 5580 - RNA, 21 nt, synthetic construct
  source 1..21: mol_type = other RNA
tccccatagtccacagagaac

SEQ ID NO: 5581 - RNA, 21 nt, synthetic construct
  source 1..21: mol_type = other RNA
tccctctccctttctcctcaa

SEQ ID NO: 5582 - RNA, 21 nt, synthetic construct
  source 1..21: mol_type = other RNA
tccctgagcagacggagtatg

SEQ ID NO: 5583 - RNA, 21 nt, synthetic construct
  source 1..21: mol_type = other RNA
tccctttctcctcaaagaagg

SEQ ID NO: 5584 - RNA, 21 nt, synthetic construct
  source 1..21: mol_type = other RNA
tccgagggccgtcagctgagc

SEQ ID NO: 5585 - RNA, 21 nt, synthetic construct
  source 1..21: mol_type = other RNA
tccgctaggaaagacaatggt

SEQ ID NO: 5586 - RNA, 21 nt, synthetic construct
  source 1..21: mol_type = other RNA
tccggggtcttctctcgccac

SEQ ID NO: 5587 - RNA, 21 nt, synthetic construct
  source 1..21: mol_type = other RNA
tccgtctgctcagggacacag

SEQ ID NO: 5588 - RNA, 21 nt, synthetic construct
  source 1..21: mol_type = other RNA
tcctagcggaatgggcacctc

SEQ ID NO: 5589 - RNA, 21 nt, synthetic construct
  source 1..21: mol_type = other RNA
tcctcaaagaaggaggacccc

SEQ ID NO: 5590 - RNA, 21 nt, synthetic construct
  source 1..21: mol_type = other RNA
tcctcaggcctcagtggctgg

SEQ ID NO: 5591 - RNA, 21 nt, synthetic construct
  source 1..21: mol_type = other RNA
tcctccttctttgaggagaaa

SEQ ID NO: 5592 - RNA, 21 nt, synthetic construct
  source 1..21: mol_type = other RNA
tccttctttgaggagaaaggg

SEQ ID NO: 5593 - RNA, 21 nt, synthetic construct
  source 1..21: mol_type = other RNA
tccttggccaccagtgttctg

SEQ ID NO: 5594 - RNA, 21 nt, synthetic construct
  source 1..21: mol_type = other RNA
tcgccactggaaatccagctc

SEQ ID NO: 5595 - RNA, 21 nt, synthetic construct
  source 1..21: mol_type = other RNA
tcggagtgcccagccactgag

SEQ ID NO: 5596 - RNA, 21 nt, synthetic construct
  source 1..21: mol_type = other RNA
tctccctttctcctcaaagaa

SEQ ID NO: 5597 - RNA, 21 nt, synthetic construct
  source 1..21: mol_type = other RNA
tctcctcaaagaaggaggacc

SEQ ID NO: 5598 - RNA, 21 nt, synthetic construct
  source 1..21: mol_type = other RNA
tctcgccactggaaatccagc

SEQ ID NO: 5599 - RNA, 21 nt, synthetic construct
  source 1..21: mol_type = other RNA
tctctcgccactggaaatcca

SEQ ID NO: 5600 - RNA, 21 nt, synthetic construct
  source 1..21: mol_type = other RNA
tctctgtggactatggggagc

SEQ ID NO: 5601 - RNA, 21 nt, synthetic construct
  source 1..21: mol_type = other RNA
tctgaccggcttccttggcca

SEQ ID NO: 5602 - RNA, 21 nt, synthetic construct
  source 1..21: mol_type = other RNA
tctgcagaacactggtggcca

SEQ ID NO: 5603 - RNA, 21 nt, synthetic construct
  source 1..21: mol_type = other RNA
tctgctcagggacacagggca

SEQ ID NO: 5604 - RNA, 21 nt, synthetic construct
  source 1..21: mol_type = other RNA
tctgtggactatggggagctg

SEQ ID NO: 5605 - RNA, 21 nt, synthetic construct
  source 1..21: mol_type = other RNA
tcttctctcgccactggaaat

SEQ ID NO: 5606 - RNA, 21 nt, synthetic construct
  source 1..21: mol_type = other RNA
tcttggcccctctgaccggct

SEQ ID NO: 5607 - RNA, 21 nt, synthetic construct
  source 1..21: mol_type = other RNA
tctttcctagcggaatgggca

SEQ ID NO: 5608 - RNA, 21 nt, synthetic construct
  source 1..21: mol_type = other RNA
tctttgaggagaaagggagag

SEQ ID NO: 5609 - RNA, 21 nt, synthetic construct
  source 1..21: mol_type = other RNA
tgaccggcttccttggccacc

SEQ ID NO: 5610 - RNA, 21 nt, synthetic construct
  source 1..21: mol_type = other RNA
tgacggccctcggagtgccca

SEQ ID NO: 5611 - RNA, 21 nt, synthetic construct
  source 1..21: mol_type = other RNA
tgactccctctccctttctcc

SEQ ID NO: 5612 - RNA, 21 nt, synthetic construct
  source 1..21: mol_type = other RNA
tgagcagacggagtatgccac

SEQ ID NO: 5613 - RNA, 21 nt, synthetic construct
  source 1..21: mol_type = other RNA
tgaggagaaagggagagggag

SEQ ID NO: 5614 - RNA, 21 nt, synthetic construct
  source 1..21: mol_type = other RNA
tgaggatggacactgctcttg

SEQ ID NO: 5615 - RNA, 21 nt, synthetic construct
  source 1..21: mol_type = other RNA
tgaggcctgaggatggacact

SEQ ID NO: 5616 - RNA, 21 nt, synthetic construct
  source 1..21: mol_type = other RNA
tgaggggtcctccttctttga

SEQ ID NO: 5617 - RNA, 21 nt, synthetic construct
  source 1..21: mol_type = other RNA
tgaggtgcccattccgctagg

SEQ ID NO: 5618 - RNA, 21 nt, synthetic construct
  source 1..21: mol_type = other RNA
tgcagaacactggtggccaag

SEQ ID NO: 5619 - RNA, 21 nt, synthetic construct
  source 1..21: mol_type = other RNA
tgccaccattgtctttcctag

SEQ ID NO: 5620 - RNA, 21 nt, synthetic construct
  source 1..21: mol_type = other RNA
tgcccagccactgaggcctga

SEQ ID NO: 5621 - RNA, 21 nt, synthetic construct
  source 1..21: mol_type = other RNA
tgcccattccgctaggaaaga

SEQ ID NO: 5622 - RNA, 21 nt, synthetic construct
  source 1..21: mol_type = other RNA
tgccctgtgtccctgagcaga

SEQ ID NO: 5623 - RNA, 21 nt, synthetic construct
  source 1..21: mol_type = other RNA
tgcctgtgttctctgtggact

SEQ ID NO: 5624 - RNA, 21 nt, synthetic construct
  source 1..21: mol_type = other RNA
tgcgggcgggggatgaggtgc

SEQ ID NO: 5625 - RNA, 21 nt, synthetic construct
  source 1..21: mol_type = other RNA
tgctcagggacacagggcacg

SEQ ID NO: 5626 - RNA, 21 nt, synthetic construct
  source 1..21: mol_type = other RNA
tgctcttggcccctctgaccg

SEQ ID NO: 5627 - RNA, 21 nt, synthetic construct
  source 1..21: mol_type = other RNA
tggaaatccagctccccatag

SEQ ID NO: 5628 - RNA, 21 nt, synthetic construct
  source 1..21: mol_type = other RNA
tggacactgctcttggcccct

SEQ ID NO: 5629 - RNA, 21 nt, synthetic construct
  source 1..21: mol_type = other RNA
tggactatggggagctggatt

SEQ ID NO: 5630 - RNA, 21 nt, synthetic construct
  source 1..21: mol_type = other RNA
tggagggtctgcagaacactg

SEQ ID NO: 5631 - RNA, 21 nt, synthetic construct
  source 1..21: mol_type = other RNA
tggatttccagtggcgagaga

SEQ ID NO: 5632 - RNA, 21 nt, synthetic construct
  source 1..21: mol_type = other RNA
tggcatactccgtctgctcag

SEQ ID NO: 5633 - RNA, 21 nt, synthetic construct
  source 1..21: mol_type = other RNA
tggccaaggaagccggtcaga

SEQ ID NO: 5634 - RNA, 21 nt, synthetic construct
  source 1..21: mol_type = other RNA
tggccaccagtgttctgcaga

SEQ ID NO: 5635 - RNA, 21 nt, synthetic construct
  source 1..21: mol_type = other RNA
tggcccctctgaccggcttcc

SEQ ID NO: 5636 - RNA, 21 nt, synthetic construct
  source 1..21: mol_type = other RNA
tggcgagagaagaccccggag

SEQ ID NO: 5637 - RNA, 21 nt, synthetic construct
  source 1..21: mol_type = other RNA
tggctgggcactccgagggcc

SEQ ID NO: 5638 - RNA, 21 nt, synthetic construct
  source 1..21: mol_type = other RNA
tgggcacctcatcccccgccc

SEQ ID NO: 5639 - RNA, 21 nt, synthetic construct
  source 1..21: mol_type = other RNA
tgggcactccgagggccgtca

SEQ ID NO: 5640 - RNA, 21 nt, synthetic construct
  source 1..21: mol_type = other RNA
tggggagctggatttccagtg

SEQ ID NO: 5641 - RNA, 21 nt, synthetic construct
  source 1..21: mol_type = other RNA
tggggctgactccctctccct

SEQ ID NO: 5642 - RNA, 21 nt, synthetic construct
  source 1..21: mol_type = other RNA
tggtggcatactccgtctgct

SEQ ID NO: 5643 - RNA, 21 nt, synthetic construct
  source 1..21: mol_type = other RNA
tggtggccaaggaagccggtc

SEQ ID NO: 5644 - RNA, 21 nt, synthetic construct
  source 1..21: mol_type = other RNA
tgtccatcctcaggcctcagt

SEQ ID NO: 5645 - RNA, 21 nt, synthetic construct
  source 1..21: mol_type = other RNA
tgtccctgagcagacggagta

SEQ ID NO: 5646 - RNA, 21 nt, synthetic construct
  source 1..21: mol_type = other RNA
tgtctttcctagcggaatggg

SEQ ID NO: 5647 - RNA, 21 nt, synthetic construct
  source 1..21: mol_type = other RNA
tgtggactatggggagctgga

SEQ ID NO: 5648 - RNA, 21 nt, synthetic construct
  source 1..21: mol_type = other RNA
tgtgtccctgagcagacggag

SEQ ID NO: 5649 - RNA, 21 nt, synthetic construct
  source 1..21: mol_type = other RNA
tgtgttctctgtggactatgg

SEQ ID NO: 5650 - RNA, 21 nt, synthetic construct
  source 1..21: mol_type = other RNA
tgttctctgtggactatgggg

SEQ ID NO: 5651 - RNA, 21 nt, synthetic construct
  source 1..21: mol_type = other RNA
ttccagtggcgagagaagacc

SEQ ID NO: 5652 - RNA, 21 nt, synthetic construct
  source 1..21: mol_type = other RNA
ttccgctaggaaagacaatgg

SEQ ID NO: 5653 - RNA, 21 nt, synthetic construct
  source 1..21: mol_type = other RNA
ttcctagcggaatgggcacct

SEQ ID NO: 5654 - RNA, 21 nt, synthetic construct
  source 1..21: mol_type = other RNA
ttccttggccaccagtgttct

SEQ ID NO: 5655 - RNA, 21 nt, synthetic construct
  source 1..21: mol_type = other RNA
ttctcctcaaagaaggaggac

SEQ ID NO: 5656 - RNA, 21 nt, synthetic construct
  source 1..21: mol_type = other RNA
ttctctcgccactggaaatcc

SEQ ID NO: 5657 - RNA, 21 nt, synthetic construct
  source 1..21: mol_type = other RNA
ttctctgtggactatggggag

SEQ ID NO: 5658 - RNA, 21 nt, synthetic construct
  source 1..21: mol_type = other RNA
ttctttgaggagaaagggaga

SEQ ID NO: 5659 - RNA, 21 nt, synthetic construct
  source 1..21: mol_type = other RNA
ttgaggagaaagggagaggga

SEQ ID NO: 5660 - RNA, 21 nt, synthetic construct
  source 1..21: mol_type = other RNA
ttggccaccagtgttctgcag

SEQ ID NO: 5661 - RNA, 21 nt, synthetic construct
  source 1..21: mol_type = other RNA
ttggcccctctgaccggcttc

SEQ ID NO: 5662 - RNA, 21 nt, synthetic construct
  source 1..21: mol_type = other RNA
ttgtctttcctagcggaatgg

SEQ ID NO: 5663 - RNA, 21 nt, synthetic construct
  source 1..21: mol_type = other RNA
tttccagtggcgagagaagac

SEQ ID NO: 5664 - RNA, 21 nt, synthetic construct
  source 1..21: mol_type = other RNA
tttcctagcggaatgggcacc

SEQ ID NO: 5665 - RNA, 21 nt, synthetic construct
  source 1..21: mol_type = other RNA
tttctcctcaaagaaggagga

SEQ ID NO: 5666 - RNA, 21 nt, synthetic construct
  source 1..21: mol_type = other RNA
tttgaggagaaagggagaggg

SEQ ID NO: 5667 - RNA, 22 nt, synthetic construct
  source 1..22: mol_type = other RNA
aaagaaggaggacccctcagcc

SEQ ID NO: 5668 - RNA, 22 nt, synthetic construct
  source 1..22: mol_type = other RNA
aaagacaatggtggcatactcc

SEQ ID NO: 5669 - RNA, 22 nt, synthetic construct
  source 1..22: mol_type = other RNA
aaatccagctccccatagtcca

SEQ ID NO: 5670 - RNA, 22 nt, synthetic construct
  source 1..22: mol_type = other RNA
aacacaggcacggctgaggggt

SEQ ID NO: 5671 - RNA, 22 nt, synthetic construct
  source 1..22: mol_type = other RNA
aacactggtggccaaggaagcc

SEQ ID NO: 5672 - RNA, 22 nt, synthetic construct
  source 1..22: mol_type = other RNA
aagaaggaggacccctcagccg

SEQ ID NO: 5673 - RNA, 22 nt, synthetic construct
  source 1..22: mol_type = other RNA
aagacaatggtggcatactccg

SEQ ID NO: 5674 - RNA, 22 nt, synthetic construct
  source 1..22: mol_type = other RNA
aagaccccggagccccccgtgc

SEQ ID NO: 5675 - RNA, 22 nt, synthetic construct
  source 1..22: mol_type = other RNA
aagagcagtgtccatcctcagg

SEQ ID NO: 5676 - RNA, 22 nt, synthetic construct
  source 1..22: mol_type = other RNA
aagccggtcagaggggccaaga

SEQ ID NO: 5677 - RNA, 22 nt, synthetic construct
  source 1..22: mol_type = other RNA
aaggaagccggtcagaggggcc

SEQ ID NO: 5678 - RNA, 22 nt, synthetic construct
  source 1..22: mol_type = other RNA
aaggaggacccctcagccgtgc

SEQ ID NO: 5679 - RNA, 22 nt, synthetic construct
  source 1..22: mol_type = other RNA
aatccagctccccatagtccac

SEQ ID NO: 5680 - RNA, 22 nt, synthetic construct
  source 1..22: mol_type = other RNA
aatgggcacctcatcccccgcc

SEQ ID NO: 5681 - RNA, 22 nt, synthetic construct
  source 1..22: mol_type = other RNA
aatggtggcatactccgtctgc

SEQ ID NO: 5682 - RNA, 22 nt, synthetic construct
  source 1..22: mol_type = other RNA
acaatggtggcatactccgtct

SEQ ID NO: 5683 - RNA, 22 nt, synthetic construct
  source 1..22: mol_type = other RNA
acacaggcacggctgaggggtc

SEQ ID NO: 5684 - RNA, 22 nt, synthetic construct
  source 1..22: mol_type = other RNA
acacagggcacggggggctccg

SEQ ID NO: 5685 - RNA, 22 nt, synthetic construct
  source 1..22: mol_type = other RNA
acactgctcttggcccctctga

SEQ ID NO: 5686 - RNA, 22 nt, synthetic construct
  source 1..22: mol_type = other RNA
acactggtggccaaggaagccg

SEQ ID NO: 5687 - RNA, 22 nt, synthetic construct
  source 1..22: mol_type = other RNA
acagagaacacaggcacggctg

SEQ ID NO: 5688 - RNA, 22 nt, synthetic construct
  source 1..22: mol_type = other RNA
acaggcacggctgaggggtcct

SEQ ID NO: 5689 - RNA, 22 nt, synthetic construct
  source 1..22: mol_type = other RNA
accattgtctttcctagcggaa

SEQ ID NO: 5690 - RNA, 22 nt, synthetic construct
  source 1..22: mol_type = other RNA
acccctcagccgtgcctgtgtt

SEQ ID NO: 5691 - RNA, 22 nt, synthetic construct
  source 1..22: mol_type = other RNA
accggcttccttggccaccagt

SEQ ID NO: 5692 - RNA, 22 nt, synthetic construct
  source 1..22: mol_type = other RNA
acctcatcccccgcccgcaggg

SEQ ID NO: 5693 - RNA, 22 nt, synthetic construct
  source 1..22: mol_type = other RNA
acggagtatgccaccattgtct

SEQ ID NO: 5694 - RNA, 22 nt, synthetic construct
  source 1..22: mol_type = other RNA
acggccctcggagtgcccagcc

SEQ ID NO: 5695 - RNA, 22 nt, synthetic construct
  source 1..22: mol_type = other RNA
acggctgaggggtcctccttct

SEQ ID NO: 5696 - RNA, 22 nt, synthetic construct
  source 1..22: mol_type = other RNA
acggggggctccggggtcttct

SEQ ID NO: 5697 - RNA, 22 nt, synthetic construct
  source 1..22: mol_type = other RNA
actatggggagctggatttcca

SEQ ID NO: 5698 - RNA, 22 nt, synthetic construct
  source 1..22: mol_type = other RNA
actccctctccctttctcctca

SEQ ID NO: 5699 - RNA, 22 nt, synthetic construct
  source 1..22: mol_type = other RNA
actccgagggccgtcagctgag

SEQ ID NO: 5700 - RNA, 22 nt, synthetic construct
  source 1..22: mol_type = other RNA
actccgtctgctcagggacaca

SEQ ID NO: 5701 - RNA, 22 nt, synthetic construct
  source 1..22: mol_type = other RNA
actgaggcctgaggatggacac

SEQ ID NO: 5702 - RNA, 22 nt, synthetic construct
  source 1..22: mol_type = other RNA
actgctcttggcccctctgacc

SEQ ID NO: 5703 - RNA, 22 nt, synthetic construct
  source 1..22: mol_type = other RNA
actggaaatccagctccccata

SEQ ID NO: 5704 - RNA, 22 nt, synthetic construct
  source 1..22: mol_type = other RNA
actggtggccaaggaagccggt

SEQ ID NO: 5705 - RNA, 22 nt, synthetic construct
  source 1..22: mol_type = other RNA
agaaagggagagggagtcagcc

SEQ ID NO: 5706 - RNA, 22 nt, synthetic construct
  source 1..22: mol_type = other RNA
agaacacaggcacggctgaggg

SEQ ID NO: 5707 - RNA, 22 nt, synthetic construct
  source 1..22: mol_type = other RNA
agaacactggtggccaaggaag

SEQ ID NO: 5708 - RNA, 22 nt, synthetic construct
  source 1..22: mol_type = other RNA
agaagaccccggagccccccgt

SEQ ID NO: 5709 - RNA, 22 nt, synthetic construct
  source 1..22: mol_type = other RNA
agaaggaggacccctcagccgt

SEQ ID NO: 5710 - RNA, 22 nt, synthetic construct
  source 1..22: mol_type = other RNA
agacaatggtggcatactccgt

SEQ ID NO: 5711 - RNA, 22 nt, synthetic construct
  source 1..22: mol_type = other RNA
agacggagtatgccaccattgt

SEQ ID NO: 5712 - RNA, 22 nt, synthetic construct
  source 1..22: mol_type = other RNA
agagaacacaggcacggctgag

SEQ ID NO: 5713 - RNA, 22 nt, synthetic construct
  source 1..22: mol_type = other RNA
agagaagaccccggagcccccc

SEQ ID NO: 5714 - RNA, 22 nt, synthetic construct
  source 1..22: mol_type = other RNA
agagcagtgtccatcctcaggc

SEQ ID NO: 5715 - RNA, 22 nt, synthetic construct
  source 1..22: mol_type = other RNA
agaggggccaagagcagtgtcc

SEQ ID NO: 5716 - RNA, 22 nt, synthetic construct
  source 1..22: mol_type = other RNA
agcagacggagtatgccaccat

SEQ ID NO: 5717 - RNA, 22 nt, synthetic construct
  source 1..22: mol_type = other RNA
agcagtgtccatcctcaggcct

SEQ ID NO: 5718 - RNA, 22 nt, synthetic construct
  source 1..22: mol_type = other RNA
agccactgaggcctgaggatgg

SEQ ID NO: 5719 - RNA, 22 nt, synthetic construct
  source 1..22: mol_type = other RNA
agccccccgtgccctgtgtccc

SEQ ID NO: 5720 - RNA, 22 nt, synthetic construct
  source 1..22: mol_type = other RNA
agcccctgcgggcgggggatga

SEQ ID NO: 5721 - RNA, 22 nt, synthetic construct
  source 1..22: mol_type = other RNA
agccggtcagaggggccaagag

SEQ ID NO: 5722 - RNA, 22 nt, synthetic construct
  source 1..22: mol_type = other RNA
agccgtgcctgtgttctctgtg

SEQ ID NO: 5723 - RNA, 22 nt, synthetic construct
  source 1..22: mol_type = other RNA
agcggaatgggcacctcatccc

SEQ ID NO: 5724 - RNA, 22 nt, synthetic construct
  source 1..22: mol_type = other RNA
agctccccatagtccacagaga

SEQ ID NO: 5725 - RNA, 22 nt, synthetic construct
  source 1..22: mol_type = other RNA
agctgacggccctcggagtgcc

SEQ ID NO: 5726 - RNA, 22 nt, synthetic construct
  source 1..22: mol_type = other RNA
agctggatttccagtggcgaga

SEQ ID NO: 5727 - RNA, 22 nt, synthetic construct
  source 1..22: mol_type = other RNA
aggaaagacaatggtggcatac

SEQ ID NO: 5728 - RNA, 22 nt, synthetic construct
  source 1..22: mol_type = other RNA
aggaagccggtcagaggggcca

SEQ ID NO: 5729 - RNA, 22 nt, synthetic construct
  source 1..22: mol_type = other RNA
aggacccctcagccgtgcctgt

SEQ ID NO: 5730 - RNA, 22 nt, synthetic construct
  source 1..22: mol_type = other RNA
aggagaaagggagagggagtca

SEQ ID NO: 5731 - RNA, 22 nt, synthetic construct
  source 1..22: mol_type = other RNA
aggaggacccctcagccgtgcc

SEQ ID NO: 5732 - RNA, 22 nt, synthetic construct
  source 1..22: mol_type = other RNA
aggatggacactgctcttggcc

SEQ ID NO: 5733 - RNA, 22 nt, synthetic construct
  source 1..22: mol_type = other RNA
aggcacggctgaggggtcctcc

SEQ ID NO: 5734 - RNA, 22 nt, synthetic construct
  source 1..22: mol_type = other RNA
aggcctcagtggctgggcactc

SEQ ID NO: 5735 - RNA, 22 nt, synthetic construct
  source 1..22: mol_type = other RNA
aggcctgaggatggacactgct

SEQ ID NO: 5736 - RNA, 22 nt, synthetic construct
  source 1..22: mol_type = other RNA
agggacacagggcacggggggc

SEQ ID NO: 5737 - RNA, 22 nt, synthetic construct
  source 1..22: mol_type = other RNA
agggccgtcagctgagcccctg

SEQ ID NO: 5738 - RNA, 22 nt, synthetic construct
  source 1..22: mol_type = other RNA
aggggccaagagcagtgtccat

SEQ ID NO: 5739 - RNA, 22 nt, synthetic construct
  source 1..22: mol_type = other RNA
aggggctcagctgacggccctc

SEQ ID NO: 5740 - RNA, 22 nt, synthetic construct
  source 1..22: mol_type = other RNA
aggggtcctccttctttgagga

SEQ ID NO: 5741 - RNA, 22 nt, synthetic construct
  source 1..22: mol_type = other RNA
agggtctgcagaacactggtgg

SEQ ID NO: 5742 - RNA, 22 nt, synthetic construct
  source 1..22: mol_type = other RNA
aggtgcccattccgctaggaaa

SEQ ID NO: 5743 - RNA, 22 nt, synthetic construct
  source 1..22: mol_type = other RNA
agtatgccaccattgtctttcc

SEQ ID NO: 5744 - RNA, 22 nt, synthetic construct
  source 1..22: mol_type = other RNA
agtccacagagaacacaggcac

SEQ ID NO: 5745 - RNA, 22 nt, synthetic construct
  source 1..22: mol_type = other RNA
agtgcccagccactgaggcctg

SEQ ID NO: 5746 - RNA, 22 nt, synthetic construct
  source 1..22: mol_type = other RNA
agtggcgagagaagaccccgga

SEQ ID NO: 5747 - RNA, 22 nt, synthetic construct
  source 1..22: mol_type = other RNA
agtggctgggcactccgagggc

SEQ ID NO: 5748 - RNA, 22 nt, synthetic construct
  source 1..22: mol_type = other RNA
agtgtccatcctcaggcctcag

SEQ ID NO: 5749 - RNA, 22 nt, synthetic construct
  source 1..22: mol_type = other RNA
atactccgtctgctcagggaca

SEQ ID NO: 5750 - RNA, 22 nt, synthetic construct
  source 1..22: mol_type = other RNA
atagtccacagagaacacaggc

SEQ ID NO: 5751 - RNA, 22 nt, synthetic construct
  source 1..22: mol_type = other RNA
atccagctccccatagtccaca

SEQ ID NO: 5752 - RNA, 22 nt, synthetic construct
  source 1..22: mol_type = other RNA
atcccccgcccgcaggggctca

SEQ ID NO: 5753 - RNA, 22 nt, synthetic construct
  source 1..22: mol_type = other RNA
atcctcaggcctcagtggctgg

SEQ ID NO: 5754 - RNA, 22 nt, synthetic construct
  source 1..22: mol_type = other RNA
atgaggtgcccattccgctagg

SEQ ID NO: 5755 - RNA, 22 nt, synthetic construct
  source 1..22: mol_type = other RNA
atgccaccattgtctttcctag

SEQ ID NO: 5756 - RNA, 22 nt, synthetic construct
  source 1..22: mol_type = other RNA
atggacactgctcttggcccct

SEQ ID NO: 5757 - RNA, 22 nt, synthetic construct
  source 1..22: mol_type = other RNA
atgggcacctcatcccccgccc

SEQ ID NO: 5758 - RNA, 22 nt, synthetic construct
  source 1..22: mol_type = other RNA
atggggagctggatttccagtg

SEQ ID NO: 5759 - RNA, 22 nt, synthetic construct
  source 1..22: mol_type = other RNA
atggtggcatactccgtctgct

SEQ ID NO: 5760 - RNA, 22 nt, synthetic construct
  source 1..22: mol_type = other RNA
attccgctaggaaagacaatgg

SEQ ID NO: 5761 - RNA, 22 nt, synthetic construct
  source 1..22: mol_type = other RNA
attgtctttcctagcggaatgg

SEQ ID NO: 5762 - RNA, 22 nt, synthetic construct
  source 1..22: mol_type = other RNA
atttccagtggcgagagaagac

SEQ ID NO: 5763 - RNA, 22 nt, synthetic construct
  source 1..22: mol_type = other RNA
caaagaaggaggacccctcagc

SEQ ID NO: 5764 - RNA, 22 nt, synthetic construct
  source 1..22: mol_type = other RNA
caagagcagtgtccatcctcag

SEQ ID NO: 5765 - RNA, 22 nt, synthetic construct
  source 1..22: mol_type = other RNA
caaggaagccggtcagaggggc

SEQ ID NO: 5766 - RNA, 22 nt, synthetic construct
  source 1..22: mol_type = other RNA
caatggtggcatactccgtctg

SEQ ID NO: 5767 - RNA, 22 nt, synthetic construct
  source 1..22: mol_type = other RNA
cacagagaacacaggcacggct

SEQ ID NO: 5768 - RNA, 22 nt, synthetic construct
  source 1..22: mol_type = other RNA
cacaggcacggctgaggggtcc

SEQ ID NO: 5769 - RNA, 22 nt, synthetic construct
  source 1..22: mol_type = other RNA
caccattgtctttcctagcgga

SEQ ID NO: 5770 - RNA, 22 nt, synthetic construct
  source 1..22: mol_type = other RNA
cacctcatcccccgcccgcagg

SEQ ID NO: 5771 - RNA, 22 nt, synthetic construct
  source 1..22: mol_type = other RNA
cacggctgaggggtcctccttc

SEQ ID NO: 5772 - RNA, 22 nt, synthetic construct
  source 1..22: mol_type = other RNA
cacggggggctccggggtcttc

SEQ ID NO: 5773 - RNA, 22 nt, synthetic construct
  source 1..22: mol_type = other RNA
cactccgagggccgtcagctga

SEQ ID NO: 5774 - RNA, 22 nt, synthetic construct
  source 1..22: mol_type = other RNA
cactgaggcctgaggatggaca

SEQ ID NO: 5775 - RNA, 22 nt, synthetic construct
  source 1..22: mol_type = other RNA
cactgctcttggcccctctgac

SEQ ID NO: 5776 - RNA, 22 nt, synthetic construct
  source 1..22: mol_type = other RNA
cactggaaatccagctccccat

SEQ ID NO: 5777 - RNA, 22 nt, synthetic construct
  source 1..22: mol_type = other RNA
cactggtggccaaggaagccgg

SEQ ID NO: 5778 - RNA, 22 nt, synthetic construct
  source 1..22: mol_type = other RNA
cagaacactggtggccaaggaa

SEQ ID NO: 5779 - RNA, 22 nt, synthetic construct
  source 1..22: mol_type = other RNA
cagacggagtatgccaccattg

SEQ ID NO: 5780 - RNA, 22 nt, synthetic construct
  source 1..22: mol_type = other RNA
cagagaacacaggcacggctga

SEQ ID NO: 5781 - RNA, 22 nt, synthetic construct
  source 1..22: mol_type = other RNA
cagaggggccaagagcagtgtc

SEQ ID NO: 5782 - RNA, 22 nt, synthetic construct
  source 1..22: mol_type = other RNA
cagccactgaggcctgaggatg

SEQ ID NO: 5783 - RNA, 22 nt, synthetic construct
  source 1..22: mol_type = other RNA
cagccgtgcctgtgttctctgt

SEQ ID NO: 5784 - RNA, 22 nt, synthetic construct
  source 1..22: mol_type = other RNA
cagctccccatagtccacagag

SEQ ID NO: 5785 - RNA, 22 nt, synthetic construct
  source 1..22: mol_type = other RNA
cagctgacggccctcggagtgc

SEQ ID NO: 5786 - RNA, 22 nt, synthetic construct
  source 1..22: mol_type = other RNA
caggcacggctgaggggtcctc

SEQ ID NO: 5787 - RNA, 22 nt, synthetic construct
  source 1..22: mol_type = other RNA
caggcctcagtggctgggcact

SEQ ID NO: 5788 - RNA, 22 nt, synthetic construct
  source 1..22: mol_type = other RNA
cagggacacagggcacgggggg

SEQ ID NO: 5789 - RNA, 22 nt, synthetic construct
  source 1..22: mol_type = other RNA
caggggctcagctgacggccct

SEQ ID NO: 5790 - RNA, 22 nt, synthetic construct
  source 1..22: mol_type = other RNA
cagtggcgagagaagaccccgg

SEQ ID NO: 5791 - RNA, 22 nt, synthetic construct
  source 1..22: mol_type = other RNA
cagtggctgggcactccgaggg

SEQ ID NO: 5792 - RNA, 22 nt, synthetic construct
  source 1..22: mol_type = other RNA
cagtgtccatcctcaggcctca

SEQ ID NO: 5793 - RNA, 22 nt, synthetic construct
  source 1..22: mol_type = other RNA
catactccgtctgctcagggac

SEQ ID NO: 5794 - RNA, 22 nt, synthetic construct
  source 1..22: mol_type = other RNA
catagtccacagagaacacagg

SEQ ID NO: 5795 - RNA, 22 nt, synthetic construct
  source 1..22: mol_type = other RNA
catcctcaggcctcagtggctg

SEQ ID NO: 5796 - RNA, 22 nt, synthetic construct
  source 1..22: mol_type = other RNA
cattccgctaggaaagacaatg

SEQ ID NO: 5797 - RNA, 22 nt, synthetic construct
  source 1..22: mol_type = other RNA
cattgtctttcctagcggaatg

SEQ ID NO: 5798 - RNA, 22 nt, synthetic construct
  source 1..22: mol_type = other RNA
ccaagagcagtgtccatcctca

SEQ ID NO: 5799 - RNA, 22 nt, synthetic construct
  source 1..22: mol_type = other RNA
ccaaggaagccggtcagagggg

SEQ ID NO: 5800 - RNA, 22 nt, synthetic construct
  source 1..22: mol_type = other RNA
ccacagagaacacaggcacggc

SEQ ID NO: 5801 - RNA, 22 nt, synthetic construct
  source 1..22: mol_type = other RNA
ccaccattgtctttcctagcgg

SEQ ID NO: 5802 - RNA, 22 nt, synthetic construct
  source 1..22: mol_type = other RNA
ccactgaggcctgaggatggac

SEQ ID NO: 5803 - RNA, 22 nt, synthetic construct
  source 1..22: mol_type = other RNA
ccactggaaatccagctcccca

SEQ ID NO: 5804 - RNA, 22 nt, synthetic construct
  source 1..22: mol_type = other RNA
ccagccactgaggcctgaggat

SEQ ID NO: 5805 - RNA, 22 nt, synthetic construct
  source 1..22: mol_type = other RNA
ccagctccccatagtccacaga

SEQ ID NO: 5806 - RNA, 22 nt, synthetic construct
  source 1..22: mol_type = other RNA
ccagtggcgagagaagaccccg

SEQ ID NO: 5807 - RNA, 22 nt, synthetic construct
  source 1..22: mol_type = other RNA
ccatagtccacagagaacacag

SEQ ID NO: 5808 - RNA, 22 nt, synthetic construct
  source 1..22: mol_type = other RNA
ccatcctcaggcctcagtggct

SEQ ID NO: 5809 - RNA, 22 nt, synthetic construct
  source 1..22: mol_type = other RNA
ccattccgctaggaaagacaat

SEQ ID NO: 5810 - RNA, 22 nt, synthetic construct
  source 1..22: mol_type = other RNA
ccattgtctttcctagcggaat

SEQ ID NO: 5811 - RNA, 22 nt, synthetic construct
  source 1..22: mol_type = other RNA
cccagccactgaggcctgagga

SEQ ID NO: 5812 - RNA, 22 nt, synthetic construct
  source 1..22: mol_type = other RNA
cccatagtccacagagaacaca

SEQ ID NO: 5813 - RNA, 22 nt, synthetic construct
  source 1..22: mol_type = other RNA
cccattccgctaggaaagacaa

SEQ ID NO: 5814 - RNA, 22 nt, synthetic construct
  source 1..22: mol_type = other RNA
ccccatagtccacagagaacac

SEQ ID NO: 5815 - RNA, 22 nt, synthetic construct
  source 1..22: mol_type = other RNA
ccccccgtgccctgtgtccctg

SEQ ID NO: 5816 - RNA, 22 nt, synthetic construct
  source 1..22: mol_type = other RNA
cccccgtgccctgtgtccctga

SEQ ID NO: 5817 - RNA, 22 nt, synthetic construct
  source 1..22: mol_type = other RNA
ccccgtgccctgtgtccctgag

SEQ ID NO: 5818 - RNA, 22 nt, synthetic construct
  source 1..22: mol_type = other RNA
cccctcagccgtgcctgtgttc

SEQ ID NO: 5819 - RNA, 22 nt, synthetic construct
  source 1..22: mol_type = other RNA
cccctctgaccggcttccttgg

SEQ ID NO: 5820 - RNA, 22 nt, synthetic construct
  source 1..22: mol_type = other RNA
cccgcaggggctcagctgacgg

SEQ ID NO: 5821 - RNA, 22 nt, synthetic construct
  source 1..22: mol_type = other RNA
cccgtgccctgtgtccctgagc

SEQ ID NO: 5822 - RNA, 22 nt, synthetic construct
  source 1..22: mol_type = other RNA
ccctcagccgtgcctgtgttct

SEQ ID NO: 5823 - RNA, 22 nt, synthetic construct
  source 1..22: mol_type = other RNA
ccctcggagtgcccagccactg

SEQ ID NO: 5824 - RNA, 22 nt, synthetic construct
  source 1..22: mol_type = other RNA
ccctctccctttctcctcaaag

SEQ ID NO: 5825 - RNA, 22 nt, synthetic construct
  source 1..22: mol_type = other RNA
ccctctgaccggcttccttggc

SEQ ID NO: 5826 - RNA, 22 nt, synthetic construct
  source 1..22: mol_type = other RNA
ccctgagcagacggagtatgcc

SEQ ID NO: 5827 - RNA, 22 nt, synthetic construct
  source 1..22: mol_type = other RNA
ccctgcgggcgggggatgaggt

SEQ ID NO: 5828 - RNA, 22 nt, synthetic construct
  source 1..22: mol_type = other RNA
ccctgtgtccctgagcagacgg

SEQ ID NO: 5829 - RNA, 22 nt, synthetic construct
  source 1..22: mol_type = other RNA
ccctttctcctcaaagaaggag

SEQ ID NO: 5830 - RNA, 22 nt, synthetic construct
  source 1..22: mol_type = other RNA
ccgagggccgtcagctgagccc

SEQ ID NO: 5831 - RNA, 22 nt, synthetic construct
  source 1..22: mol_type = other RNA
ccgcaggggctcagctgacggc

SEQ ID NO: 5832 - RNA, 22 nt, synthetic construct
  source 1..22: mol_type = other RNA
ccgcccgcaggggctcagctga

SEQ ID NO: 5833 - RNA, 22 nt, synthetic construct
  source 1..22: mol_type = other RNA
ccgctaggaaagacaatggtgg

SEQ ID NO: 5834 - RNA, 22 nt, synthetic construct
  source 1..22: mol_type = other RNA
ccggcttccttggccaccagtg

SEQ ID NO: 5835 - RNA, 22 nt, synthetic construct
  source 1..22: mol_type = other RNA
ccggggtcttctctcgccactg

SEQ ID NO: 5836 - RNA, 22 nt, synthetic construct
  source 1..22: mol_type = other RNA
ccggtcagaggggccaagagca

SEQ ID NO: 5837 - RNA, 22 nt, synthetic construct
  source 1..22: mol_type = other RNA
ccgtcagctgagcccctgcggg

SEQ ID NO: 5838 - RNA, 22 nt, synthetic construct
  source 1..22: mol_type = other RNA
ccgtctgctcagggacacaggg

SEQ ID NO: 5839 - RNA, 22 nt, synthetic construct
  source 1..22: mol_type = other RNA
ccgtgccctgtgtccctgagca

SEQ ID NO: 5840 - RNA, 22 nt, synthetic construct
  source 1..22: mol_type = other RNA
ccgtgcctgtgttctctgtgga

SEQ ID NO: 5841 - RNA, 22 nt, synthetic construct
  source 1..22: mol_type = other RNA
ccgtggggctgactccctctcc

SEQ ID NO: 5842 - RNA, 22 nt, synthetic construct
  source 1..22: mol_type = other RNA
cctagcggaatgggcacctcat

SEQ ID NO: 5843 - RNA, 22 nt, synthetic construct
  source 1..22: mol_type = other RNA
cctcaaagaaggaggacccctc

SEQ ID NO: 5844 - RNA, 22 nt, synthetic construct
  source 1..22: mol_type = other RNA
cctcagccgtgcctgtgttctc

SEQ ID NO: 5845 - RNA, 22 nt, synthetic construct
  source 1..22: mol_type = other RNA
cctcaggcctcagtggctgggc

SEQ ID NO: 5846 - RNA, 22 nt, synthetic construct
  source 1..22: mol_type = other RNA
cctcagtggctgggcactccga

SEQ ID NO: 5847 - RNA, 22 nt, synthetic construct
  source 1..22: mol_type = other RNA
cctccttctttgaggagaaagg

SEQ ID NO: 5848 - RNA, 22 nt, synthetic construct
  source 1..22: mol_type = other RNA
cctcggagtgcccagccactga

SEQ ID NO: 5849 - RNA, 22 nt, synthetic construct
  source 1..22: mol_type = other RNA
cctctccctttctcctcaaaga

SEQ ID NO: 5850 - RNA, 22 nt, synthetic construct
  source 1..22: mol_type = other RNA
cctctgaccggcttccttggcc

SEQ ID NO: 5851 - RNA, 22 nt, synthetic construct
  source 1..22: mol_type = other RNA
cctgagcagacggagtatgcca

SEQ ID NO: 5852 - RNA, 22 nt, synthetic construct
  source 1..22: mol_type = other RNA
cctgaggatggacactgctctt

SEQ ID NO: 5853 - RNA, 22 nt, synthetic construct
  source 1..22: mol_type = other RNA
cctgcgggcgggggatgaggtg

SEQ ID NO: 5854 - RNA, 22 nt, synthetic construct
  source 1..22: mol_type = other RNA
cctgtgtccctgagcagacgga

SEQ ID NO: 5855 - RNA, 22 nt, synthetic construct
  source 1..22: mol_type = other RNA
cctgtgttctctgtggactatg

SEQ ID NO: 5856 - RNA, 22 nt, synthetic construct
  source 1..22: mol_type = other RNA
ccttctttgaggagaaagggag

SEQ ID NO: 5857 - RNA, 22 nt, synthetic construct
  source 1..22: mol_type = other RNA
ccttggccaccagtgttctgca

SEQ ID NO: 5858 - RNA, 22 nt, synthetic construct
  source 1..22: mol_type = other RNA
cctttctcctcaaagaaggagg

SEQ ID NO: 5859 - RNA, 22 nt, synthetic construct
  source 1..22: mol_type = other RNA
cgagagaagaccccggagcccc

SEQ ID NO: 5860 - RNA, 22 nt, synthetic construct
  source 1..22: mol_type = other RNA
cgagggccgtcagctgagcccc

SEQ ID NO: 5861 - RNA, 22 nt, synthetic construct
  source 1..22: mol_type = other RNA
cgcaggggctcagctgacggcc

SEQ ID NO: 5862 - RNA, 22 nt, synthetic construct
  source 1..22: mol_type = other RNA
cgccactggaaatccagctccc

SEQ ID NO: 5863 - RNA, 22 nt, synthetic construct
  source 1..22: mol_type = other RNA
cgcccgcaggggctcagctgac

SEQ ID NO: 5864 - RNA, 22 nt, synthetic construct
  source 1..22: mol_type = other RNA
cgctaggaaagacaatggtggc

SEQ ID NO: 5865 - RNA, 22 nt, synthetic construct
  source 1..22: mol_type = other RNA
cggaatgggcacctcatccccc

SEQ ID NO: 5866 - RNA, 22 nt, synthetic construct
  source 1..22: mol_type = other RNA
cggagccccccgtgccctgtgt

SEQ ID NO: 5867 - RNA, 22 nt, synthetic construct
  source 1..22: mol_type = other RNA
cggagtatgccaccattgtctt

SEQ ID NO: 5868 - RNA, 22 nt, synthetic construct
  source 1..22: mol_type = other RNA
cggagtgcccagccactgaggc

SEQ ID NO: 5869 - RNA, 22 nt, synthetic construct
  source 1..22: mol_type = other RNA
cggccctcggagtgcccagcca

SEQ ID NO: 5870 - RNA, 22 nt, synthetic construct
  source 1..22: mol_type = other RNA
cggctgaggggtcctccttctt

SEQ ID NO: 5871 - RNA, 22 nt, synthetic construct
  source 1..22: mol_type = other RNA
cggcttccttggccaccagtgt

SEQ ID NO: 5872 - RNA, 22 nt, synthetic construct
  source 1..22: mol_type = other RNA
cgggcgggggatgaggtgccca

SEQ ID NO: 5873 - RNA, 22 nt, synthetic construct
  source 1..22: mol_type = other RNA
cgggggatgaggtgcccattcc

SEQ ID NO: 5874 - RNA, 22 nt, synthetic construct
  source 1..22: mol_type = other RNA
cggggggctccggggtcttctc

SEQ ID NO: 5875 - RNA, 22 nt, synthetic construct
  source 1..22: mol_type = other RNA
cggggtcttctctcgccactgg

SEQ ID NO: 5876 - RNA, 22 nt, synthetic construct
  source 1..22: mol_type = other RNA
cggtcagaggggccaagagcag

SEQ ID NO: 5877 - RNA, 22 nt, synthetic construct
  source 1..22: mol_type = other RNA
cgtcagctgagcccctgcgggc

SEQ ID NO: 5878 - RNA, 22 nt, synthetic construct
  source 1..22: mol_type = other RNA
cgtctgctcagggacacagggc

SEQ ID NO: 5879 - RNA, 22 nt, synthetic construct
  source 1..22: mol_type = other RNA
cgtgccctgtgtccctgagcag

SEQ ID NO: 5880 - RNA, 22 nt, synthetic construct
  source 1..22: mol_type = other RNA
cgtgcctgtgttctctgtggac

SEQ ID NO: 5881 - RNA, 22 nt, synthetic construct
  source 1..22: mol_type = other RNA
cgtggggctgactccctctccc

SEQ ID NO: 5882 - RNA, 22 nt, synthetic construct
  source 1..22: mol_type = other RNA
ctagcggaatgggcacctcatc

SEQ ID NO: 5883 - RNA, 22 nt, synthetic construct
  source 1..22: mol_type = other RNA
ctaggaaagacaatggtggcat

SEQ ID NO: 5884 - RNA, 22 nt, synthetic construct
  source 1..22: mol_type = other RNA
ctatggggagctggatttccag

SEQ ID NO: 5885 - RNA, 22 nt, synthetic construct
  source 1..22: mol_type = other RNA
ctcaaagaaggaggacccctca

SEQ ID NO: 5886 - RNA, 22 nt, synthetic construct
  source 1..22: mol_type = other RNA
ctcagccgtgcctgtgttctct

SEQ ID NO: 5887 - RNA, 22 nt, synthetic construct
  source 1..22: mol_type = other RNA
ctcagctgacggccctcggagt

SEQ ID NO: 5888 - RNA, 22 nt, synthetic construct
  source 1..22: mol_type = other RNA
ctcaggcctcagtggctgggca

SEQ ID NO: 5889 - RNA, 22 nt, synthetic construct
  source 1..22: mol_type = other RNA
ctcagggacacagggcacgggg

SEQ ID NO: 5890 - RNA, 22 nt, synthetic construct
  source 1..22: mol_type = other RNA
ctcagtggctgggcactccgag

SEQ ID NO: 5891 - RNA, 22 nt, synthetic construct
  source 1..22: mol_type = other RNA
ctccccatagtccacagagaac

SEQ ID NO: 5892 - RNA, 22 nt, synthetic construct
  source 1..22: mol_type = other RNA
ctccctctccctttctcctcaa

SEQ ID NO: 5893 - RNA, 22 nt, synthetic construct
  source 1..22: mol_type = other RNA
ctccctttctcctcaaagaagg

SEQ ID NO: 5894 - RNA, 22 nt, synthetic construct
  source 1..22: mol_type = other RNA
ctccgagggccgtcagctgagc

SEQ ID NO: 5895 - RNA, 22 nt, synthetic construct
  source 1..22: mol_type = other RNA
ctccggggtcttctctcgccac

SEQ ID NO: 5896 - RNA, 22 nt, synthetic construct
  source 1..22: mol_type = other RNA
ctccgtctgctcagggacacag

SEQ ID NO: 5897 - RNA, 22 nt, synthetic construct
  source 1..22: mol_type = other RNA
ctcctcaaagaaggaggacccc

SEQ ID NO: 5898 - RNA, 22 nt, synthetic construct
  source 1..22: mol_type = other RNA
ctccttctttgaggagaaaggg

SEQ ID NO: 5899 - RNA, 22 nt, synthetic construct
  source 1..22: mol_type = other RNA
ctcgccactggaaatccagctc

SEQ ID NO: 5900 - RNA, 22 nt, synthetic construct
  source 1..22: mol_type = other RNA
ctcggagtgcccagccactgag

SEQ ID NO: 5901 - RNA, 22 nt, synthetic construct
  source 1..22: mol_type = other RNA
ctctccctttctcctcaaagaa

SEQ ID NO: 5902 - RNA, 22 nt, synthetic construct
  source 1..22: mol_type = other RNA
ctctcgccactggaaatccagc

SEQ ID NO: 5903 - RNA, 22 nt, synthetic construct
  source 1..22: mol_type = other RNA
ctctgaccggcttccttggcca

SEQ ID NO: 5904 - RNA, 22 nt, synthetic construct
  source 1..22: mol_type = other RNA
ctctgtggactatggggagctg

SEQ ID NO: 5905 - RNA, 22 nt, synthetic construct
  source 1..22: mol_type = other RNA
ctcttggcccctctgaccggct

SEQ ID NO: 5906 - RNA, 22 nt, synthetic construct
  source 1..22: mol_type = other RNA
ctgaccggcttccttggccacc

SEQ ID NO: 5907 - RNA, 22 nt, synthetic construct
  source 1..22: mol_type = other RNA
ctgacggccctcggagtgccca

SEQ ID NO: 5908 - RNA, 22 nt, synthetic construct
  source 1..22: mol_type = other RNA
ctgactccctctccctttctcc

SEQ ID NO: 5909 - RNA, 22 nt, synthetic construct
  source 1..22: mol_type = other RNA
ctgagcagacggagtatgccac

SEQ ID NO: 5910 - RNA, 22 nt, synthetic construct
  source 1..22: mol_type = other RNA
ctgaggatggacactgctcttg

SEQ ID NO: 5911 - RNA, 22 nt, synthetic construct
  source 1..22: mol_type = other RNA
ctgaggcctgaggatggacact

SEQ ID NO: 5912 - RNA, 22 nt, synthetic construct
  source 1..22: mol_type = other RNA
ctgaggggtcctccttctttga

SEQ ID NO: 5913 - RNA, 22 nt, synthetic construct
  source 1..22: mol_type = other RNA
ctgcagaacactggtggccaag

SEQ ID NO: 5914 - RNA, 22 nt, synthetic construct
  source 1..22: mol_type = other RNA
ctgcgggcgggggatgaggtgc

SEQ ID NO: 5915 - RNA, 22 nt, synthetic construct
  source 1..22: mol_type = other RNA
ctgctcagggacacagggcacg

SEQ ID NO: 5916 - RNA, 22 nt, synthetic construct
  source 1..22: mol_type = other RNA
ctgctcttggcccctctgaccg

SEQ ID NO: 5917 - RNA, 22 nt, synthetic construct
  source 1..22: mol_type = other RNA
ctggaaatccagctccccatag

SEQ ID NO: 5918 - RNA, 22 nt, synthetic construct
  source 1..22: mol_type = other RNA
ctggatttccagtggcgagaga

SEQ ID NO: 5919 - RNA, 22 nt, synthetic construct
  source 1..22: mol_type = other RNA
ctgggcactccgagggccgtca

SEQ ID NO: 5920 - RNA, 22 nt, synthetic construct
  source 1..22: mol_type = other RNA
ctggtggccaaggaagccggtc

SEQ ID NO: 5921 - RNA, 22 nt, synthetic construct
  source 1..22: mol_type = other RNA
ctgtggactatggggagctgga

SEQ ID NO: 5922 - RNA, 22 nt, synthetic construct
  source 1..22: mol_type = other RNA
ctgtgtccctgagcagacggag

SEQ ID NO: 5923 - RNA, 22 nt, synthetic construct
  source 1..22: mol_type = other RNA
ctgtgttctctgtggactatgg

SEQ ID NO: 5924 - RNA, 22 nt, synthetic construct
  source 1..22: mol_type = other RNA
cttccttggccaccagtgttct

SEQ ID NO: 5925 - RNA, 22 nt, synthetic construct
  source 1..22: mol_type = other RNA
cttctctcgccactggaaatcc

SEQ ID NO: 5926 - RNA, 22 nt, synthetic construct
  source 1..22: mol_type = other RNA
cttctttgaggagaaagggaga

SEQ ID NO: 5927 - RNA, 22 nt, synthetic construct
  source 1..22: mol_type = other RNA
cttggccaccagtgttctgcag

SEQ ID NO: 5928 - RNA, 22 nt, synthetic construct
  source 1..22: mol_type = other RNA
cttggcccctctgaccggcttc

SEQ ID NO: 5929 - RNA, 22 nt, synthetic construct
  source 1..22: mol_type = other RNA
ctttcctagcggaatgggcacc

SEQ ID NO: 5930 - RNA, 22 nt, synthetic construct
  source 1..22: mol_type = other RNA
ctttctcctcaaagaaggagga

SEQ ID NO: 5931 - RNA, 22 nt, synthetic construct
  source 1..22: mol_type = other RNA
ctttgaggagaaagggagaggg

SEQ ID NO: 5932 - RNA, 22 nt, synthetic construct
  source 1..22: mol_type = other RNA
gaaagacaatggtggcatactc

SEQ ID NO: 5933 - RNA, 22 nt, synthetic construct
  source 1..22: mol_type = other RNA
gaaatccagctccccatagtcc

SEQ ID NO: 5934 - RNA, 22 nt, synthetic construct
  source 1..22: mol_type = other RNA
gaacacaggcacggctgagggg

SEQ ID NO: 5935 - RNA, 22 nt, synthetic construct
  source 1..22: mol_type = other RNA
gaacactggtggccaaggaagc

SEQ ID NO: 5936 - RNA, 22 nt, synthetic construct
  source 1..22: mol_type = other RNA
gaagaccccggagccccccgtg

SEQ ID NO: 5937 - RNA, 22 nt, synthetic construct
  source 1..22: mol_type = other RNA
gaagccggtcagaggggccaag

SEQ ID NO: 5938 - RNA, 22 nt, synthetic construct
  source 1..22: mol_type = other RNA
gaaggaggacccctcagccgtg

SEQ ID NO: 5939 - RNA, 22 nt, synthetic construct
  source 1..22: mol_type = other RNA
gaatgggcacctcatcccccgc

SEQ ID NO: 5940 - RNA, 22 nt, synthetic construct
  source 1..22: mol_type = other RNA
gacaatggtggcatactccgtc

SEQ ID NO: 5941 - RNA, 22 nt, synthetic construct
  source 1..22: mol_type = other RNA
gacacagggcacggggggctcc

SEQ ID NO: 5942 - RNA, 22 nt, synthetic construct
  source 1..22: mol_type = other RNA
gacactgctcttggcccctctg

SEQ ID NO: 5943 - RNA, 22 nt, synthetic construct
  source 1..22: mol_type = other RNA
gacccctcagccgtgcctgtgt

SEQ ID NO: 5944 - RNA, 22 nt, synthetic construct
  source 1..22: mol_type = other RNA
gaccggcttccttggccaccag

SEQ ID NO: 5945 - RNA, 22 nt, synthetic construct
  source 1..22: mol_type = other RNA
gacggagtatgccaccattgtc

SEQ ID NO: 5946 - RNA, 22 nt, synthetic construct
  source 1..22: mol_type = other RNA
gacggccctcggagtgcccagc

SEQ ID NO: 5947 - RNA, 22 nt, synthetic construct
  source 1..22: mol_type = other RNA
gactatggggagctggatttcc

SEQ ID NO: 5948 - RNA, 22 nt, synthetic construct
  source 1..22: mol_type = other RNA
gactccctctccctttctcctc

SEQ ID NO: 5949 - RNA, 22 nt, synthetic construct
  source 1..22: mol_type = other RNA
gagaaagggagagggagtcagc

SEQ ID NO: 5950 - RNA, 22 nt, synthetic construct
  source 1..22: mol_type = other RNA
gagaacacaggcacggctgagg

SEQ ID NO: 5951 - RNA, 22 nt, synthetic construct
  source 1..22: mol_type = other RNA
gagaagaccccggagccccccg

SEQ ID NO: 5952 - RNA, 22 nt, synthetic construct
  source 1..22: mol_type = other RNA
gagagaagaccccggagccccc

SEQ ID NO: 5953 - RNA, 22 nt, synthetic construct
  source 1..22: mol_type = other RNA
gagcagacggagtatgccacca

SEQ ID NO: 5954 - RNA, 22 nt, synthetic construct
  source 1..22: mol_type = other RNA
gagcagtgtccatcctcaggcc

SEQ ID NO: 5955 - RNA, 22 nt, synthetic construct
  source 1..22: mol_type = other RNA
gagccccccgtgccctgtgtcc

SEQ ID NO: 5956 - RNA, 22 nt, synthetic construct
  source 1..22: mol_type = other RNA
gagctggatttccagtggcgag

SEQ ID NO: 5957 - RNA, 22 nt, synthetic construct
  source 1..22: mol_type = other RNA
gaggacccctcagccgtgcctg

SEQ ID NO: 5958 - RNA, 22 nt, synthetic construct
  source 1..22: mol_type = other RNA
gaggagaaagggagagggagtc

SEQ ID NO: 5959 - RNA, 22 nt, synthetic construct
  source 1..22: mol_type = other RNA
gaggatggacactgctcttggc

SEQ ID NO: 5960 - RNA, 22 nt, synthetic construct
  source 1..22: mol_type = other RNA
gaggcctgaggatggacactgc

SEQ ID NO: 5961 - RNA, 22 nt, synthetic construct
  source 1..22: mol_type = other RNA
gagggccgtcagctgagcccct

SEQ ID NO: 5962 - RNA, 22 nt, synthetic construct
  source 1..22: mol_type = other RNA
gaggggccaagagcagtgtcca

SEQ ID NO: 5963 - RNA, 22 nt, synthetic construct
  source 1..22: mol_type = other RNA
gaggggtcctccttctttgagg

SEQ ID NO: 5964 - RNA, 22 nt, synthetic construct
  source 1..22: mol_type = other RNA
gagggtctgcagaacactggtg

SEQ ID NO: 5965 - RNA, 22 nt, synthetic construct
  source 1..22: mol_type = other RNA
gaggtgcccattccgctaggaa

SEQ ID NO: 5966 - RNA, 22 nt, synthetic construct
  source 1..22: mol_type = other RNA
gagtatgccaccattgtctttc

SEQ ID NO: 5967 - RNA, 22 nt, synthetic construct
  source 1..22: mol_type = other RNA
gagtgcccagccactgaggcct

SEQ ID NO: 5968 - RNA, 22 nt, synthetic construct
  source 1..22: mol_type = other RNA
gatgaggtgcccattccgctag

SEQ ID NO: 5969 - RNA, 22 nt, synthetic construct
  source 1..22: mol_type = other RNA
gatggacactgctcttggcccc

SEQ ID NO: 5970 - RNA, 22 nt, synthetic construct
  source 1..22: mol_type = other RNA
gatttccagtggcgagagaaga

SEQ ID NO: 5971 - RNA, 22 nt, synthetic construct
  source 1..22: mol_type = other RNA
gcacctcatcccccgcccgcag

SEQ ID NO: 5972 - RNA, 22 nt, synthetic construct
  source 1..22: mol_type = other RNA
gcacggctgaggggtcctcctt

SEQ ID NO: 5973 - RNA, 22 nt, synthetic construct
  source 1..22: mol_type = other RNA
gcacggggggctccggggtctt

SEQ ID NO: 5974 - RNA, 22 nt, synthetic construct
  source 1..22: mol_type = other RNA
gcactccgagggccgtcagctg

SEQ ID NO: 5975 - RNA, 22 nt, synthetic construct
  source 1..22: mol_type = other RNA
gcagaacactggtggccaagga

SEQ ID NO: 5976 - RNA, 22 nt, synthetic construct
  source 1..22: mol_type = other RNA
gcagacggagtatgccaccatt

SEQ ID NO: 5977 - RNA, 22 nt, synthetic construct
  source 1..22: mol_type = other RNA
gcaggggctcagctgacggccc

SEQ ID NO: 5978 - RNA, 22 nt, synthetic construct
  source 1..22: mol_type = other RNA
gcagtgtccatcctcaggcctc

SEQ ID NO: 5979 - RNA, 22 nt, synthetic construct
  source 1..22: mol_type = other RNA
gcatactccgtctgctcaggga

SEQ ID NO: 5980 - RNA, 22 nt, synthetic construct
  source 1..22: mol_type = other RNA
gccaagagcagtgtccatcctc

SEQ ID NO: 5981 - RNA, 22 nt, synthetic construct
  source 1..22: mol_type = other RNA
gccaaggaagccggtcagaggg

SEQ ID NO: 5982 - RNA, 22 nt, synthetic construct
  source 1..22: mol_type = other RNA
gccaccattgtctttcctagcg

SEQ ID NO: 5983 - RNA, 22 nt, synthetic construct
  source 1..22: mol_type = other RNA
gccactgaggcctgaggatgga

SEQ ID NO: 5984 - RNA, 22 nt, synthetic construct
  source 1..22: mol_type = other RNA
gccactggaaatccagctcccc

SEQ ID NO: 5985 - RNA, 22 nt, synthetic construct
  source 1..22: mol_type = other RNA
gcccagccactgaggcctgagg

SEQ ID NO: 5986 - RNA, 22 nt, synthetic construct
  source 1..22: mol_type = other RNA
gcccattccgctaggaaagaca

SEQ ID NO: 5987 - RNA, 22 nt, synthetic construct
  source 1..22: mol_type = other RNA
gccccccgtgccctgtgtccct

SEQ ID NO: 5988 - RNA, 22 nt, synthetic construct
  source 1..22: mol_type = other RNA
gcccctctgaccggcttccttg

SEQ ID NO: 5989 - RNA, 22 nt, synthetic construct
  source 1..22: mol_type = other RNA
gcccgcaggggctcagctgacg

SEQ ID NO: 5990 - RNA, 22 nt, synthetic construct
  source 1..22: mol_type = other RNA
gccctcggagtgcccagccact

SEQ ID NO: 5991 - RNA, 22 nt, synthetic construct
  source 1..22: mol_type = other RNA
gccctgtgtccctgagcagacg

SEQ ID NO: 5992 - RNA, 22 nt, synthetic construct
  source 1..22: mol_type = other RNA
gccggtcagaggggccaagagc

SEQ ID NO: 5993 - RNA, 22 nt, synthetic construct
  source 1..22: mol_type = other RNA
gccgtcagctgagcccctgcgg

SEQ ID NO: 5994 - RNA, 22 nt, synthetic construct
  source 1..22: mol_type = other RNA
gccgtgcctgtgttctctgtgg

SEQ ID NO: 5995 - RNA, 22 nt, synthetic construct
  source 1..22: mol_type = other RNA
gccgtggggctgactccctctc

SEQ ID NO: 5996 - RNA, 22 nt, synthetic construct
  source 1..22: mol_type = other RNA
gcctcagtggctgggcactccg

SEQ ID NO: 5997 - RNA, 22 nt, synthetic construct
  source 1..22: mol_type = other RNA
gcctgaggatggacactgctct

SEQ ID NO: 5998 - RNA, 22 nt, synthetic construct
  source 1..22: mol_type = other RNA
gcctgtgttctctgtggactat

SEQ ID NO: 5999 - RNA, 22 nt, synthetic construct
  source 1..22: mol_type = other RNA
gcgagagaagaccccggagccc

SEQ ID NO: 6000 - RNA, 22 nt, synthetic construct
  source 1..22: mol_type = other RNA
gcggaatgggcacctcatcccc

SEQ ID NO: 6001 - RNA, 22 nt, synthetic construct
  source 1..22: mol_type = other RNA
gcgggggatgaggtgcccattc

SEQ ID NO: 6002 - RNA, 22 nt, synthetic construct
  source 1..22: mol_type = other RNA
gctaggaaagacaatggtggca

SEQ ID NO: 6003 - RNA, 22 nt, synthetic construct
  source 1..22: mol_type = other RNA
gctcagctgacggccctcggag

SEQ ID NO: 6004 - RNA, 22 nt, synthetic construct
  source 1..22: mol_type = other RNA
gctcagggacacagggcacggg

SEQ ID NO: 6005 - RNA, 22 nt, synthetic construct
  source 1..22: mol_type = other RNA
gctccccatagtccacagagaa

SEQ ID NO: 6006 - RNA, 22 nt, synthetic construct
  source 1..22: mol_type = other RNA
gctccggggtcttctctcgcca

SEQ ID NO: 6007 - RNA, 22 nt, synthetic construct
  source 1..22: mol_type = other RNA
gctcttggcccctctgaccggc

SEQ ID NO: 6008 - RNA, 22 nt, synthetic construct
  source 1..22: mol_type = other RNA
gctgacggccctcggagtgccc

SEQ ID NO: 6009 - RNA, 22 nt, synthetic construct
  source 1..22: mol_type = other RNA
gctgactccctctccctttctc

SEQ ID NO: 6010 - RNA, 22 nt, synthetic construct
  source 1..22: mol_type = other RNA
gctgaggggtcctccttctttg

SEQ ID NO: 6011 - RNA, 22 nt, synthetic construct
  source 1..22: mol_type = other RNA
gctggatttccagtggcgagag

SEQ ID NO: 6012 - RNA, 22 nt, synthetic construct
  source 1..22: mol_type = other RNA
gctgggcactccgagggccgtc

SEQ ID NO: 6013 - RNA, 22 nt, synthetic construct
  source 1..22: mol_type = other RNA
gcttccttggccaccagtgttc

SEQ ID NO: 6014 - RNA, 22 nt, synthetic construct
  source 1..22: mol_type = other RNA
ggaaagacaatggtggcatact

SEQ ID NO: 6015 - RNA, 22 nt, synthetic construct
  source 1..22: mol_type = other RNA
ggaaatccagctccccatagtc

SEQ ID NO: 6016 - RNA, 22 nt, synthetic construct
  source 1..22: mol_type = other RNA
ggaagccggtcagaggggccaa

SEQ ID NO: 6017 - RNA, 22 nt, synthetic construct
  source 1..22: mol_type = other RNA
ggaatgggcacctcatcccccg

SEQ ID NO: 6018 - RNA, 22 nt, synthetic construct
  source 1..22: mol_type = other RNA
ggacacagggcacggggggctc

SEQ ID NO: 6019 - RNA, 22 nt, synthetic construct
  source 1..22: mol_type = other RNA
ggacactgctcttggcccctct

SEQ ID NO: 6020 - RNA, 22 nt, synthetic construct
  source 1..22: mol_type = other RNA
ggacccctcagccgtgcctgtg

SEQ ID NO: 6021 - RNA, 22 nt, synthetic construct
  source 1..22: mol_type = other RNA
ggactatggggagctggatttc

SEQ ID NO: 6022 - RNA, 22 nt, synthetic construct
  source 1..22: mol_type = other RNA
ggagaaagggagagggagtcag

SEQ ID NO: 6023 - RNA, 22 nt, synthetic construct
  source 1..22: mol_type = other RNA
ggagccccccgtgccctgtgtc

SEQ ID NO: 6024 - RNA, 22 nt, synthetic construct
  source 1..22: mol_type = other RNA
ggagctggatttccagtggcga

SEQ ID NO: 6025 - RNA, 22 nt, synthetic construct
  source 1..22: mol_type = other RNA
ggaggacccctcagccgtgcct

SEQ ID NO: 6026 - RNA, 22 nt, synthetic construct
  source 1..22: mol_type = other RNA
ggagggtctgcagaacactggt

SEQ ID NO: 6027 - RNA, 22 nt, synthetic construct
  source 1..22: mol_type = other RNA
ggagtatgccaccattgtcttt

SEQ ID NO: 6028 - RNA, 22 nt, synthetic construct
  source 1..22: mol_type = other RNA
ggagtgcccagccactgaggcc

SEQ ID NO: 6029 - RNA, 22 nt, synthetic construct
  source 1..22: mol_type = other RNA
ggatgaggtgcccattccgcta

SEQ ID NO: 6030 - RNA, 22 nt, synthetic construct
  source 1..22: mol_type = other RNA
ggatggacactgctcttggccc

SEQ ID NO: 6031 - RNA, 22 nt, synthetic construct
  source 1..22: mol_type = other RNA
ggatttccagtggcgagagaag

SEQ ID NO: 6032 - RNA, 22 nt, synthetic construct
  source 1..22: mol_type = other RNA
ggcacctcatcccccgcccgca

SEQ ID NO: 6033 - RNA, 22 nt, synthetic construct
  source 1..22: mol_type = other RNA
ggcacggctgaggggtcctcct

SEQ ID NO: 6034 - RNA, 22 nt, synthetic construct
  source 1..22: mol_type = other RNA
ggcactccgagggccgtcagct

SEQ ID NO: 6035 - RNA, 22 nt, synthetic construct
  source 1..22: mol_type = other RNA
ggcatactccgtctgctcaggg

SEQ ID NO: 6036 - RNA, 22 nt, synthetic construct
  source 1..22: mol_type = other RNA
ggccaagagcagtgtccatcct

SEQ ID NO: 6037 - RNA, 22 nt, synthetic construct
  source 1..22: mol_type = other RNA
ggccaaggaagccggtcagagg

SEQ ID NO: 6038 - RNA, 22 nt, synthetic construct
  source 1..22: mol_type = other RNA
ggcccctctgaccggcttcctt

SEQ ID NO: 6039 - RNA, 22 nt, synthetic construct
  source 1..22: mol_type = other RNA
ggccctcggagtgcccagccac

SEQ ID NO: 6040 - RNA, 22 nt, synthetic construct
  source 1..22: mol_type = other RNA
ggccgtcagctgagcccctgcg

SEQ ID NO: 6041 - RNA, 22 nt, synthetic construct
  source 1..22: mol_type = other RNA
ggccgtggggctgactccctct

SEQ ID NO: 6042 - RNA, 22 nt, synthetic construct
  source 1..22: mol_type = other RNA
ggcctcagtggctgggcactcc

SEQ ID NO: 6043 - RNA, 22 nt, synthetic construct
  source 1..22: mol_type = other RNA
ggcctgaggatggacactgctc

SEQ ID NO: 6044 - RNA, 22 nt, synthetic construct
  source 1..22: mol_type = other RNA
ggcgagagaagaccccggagcc

SEQ ID NO: 6045 - RNA, 22 nt, synthetic construct
  source 1..22: mol_type = other RNA
ggcgggggatgaggtgcccatt

SEQ ID NO: 6046 - RNA, 22 nt, synthetic construct
  source 1..22: mol_type = other RNA
ggctcagctgacggccctcgga

SEQ ID NO: 6047 - RNA, 22 nt, synthetic construct
  source 1..22: mol_type = other RNA
ggctccggggtcttctctcgcc

SEQ ID NO: 6048 - RNA, 22 nt, synthetic construct
  source 1..22: mol_type = other RNA
ggctgactccctctccctttct

SEQ ID NO: 6049 - RNA, 22 nt, synthetic construct
  source 1..22: mol_type = other RNA
ggctgaggggtcctccttcttt

SEQ ID NO: 6050 - RNA, 22 nt, synthetic construct
  source 1..22: mol_type = other RNA
ggctgggcactccgagggccgt

SEQ ID NO: 6051 - RNA, 22 nt, synthetic construct
  source 1..22: mol_type = other RNA
ggcttccttggccaccagtgtt

SEQ ID NO: 6052 - RNA, 22 nt, synthetic construct
  source 1..22: mol_type = other RNA
gggacacagggcacggggggct

SEQ ID NO: 6053 - RNA, 22 nt, synthetic construct
  source 1..22: mol_type = other RNA
gggagctggatttccagtggcg

SEQ ID NO: 6054 - RNA, 22 nt, synthetic construct
  source 1..22: mol_type = other RNA
gggatgaggtgcccattccgct

SEQ ID NO: 6055 - RNA, 22 nt, synthetic construct
  source 1..22: mol_type = other RNA
gggcactccgagggccgtcagc

SEQ ID NO: 6056 - RNA, 22 nt, synthetic construct
  source 1..22: mol_type = other RNA
gggccaagagcagtgtccatcc

SEQ ID NO: 6057 - RNA, 22 nt, synthetic construct
  source 1..22: mol_type = other RNA
gggccgtcagctgagcccctgc

SEQ ID NO: 6058 - RNA, 22 nt, synthetic construct
  source 1..22: mol_type = other RNA
gggcgggggatgaggtgcccat

SEQ ID NO: 6059 - RNA, 22 nt, synthetic construct
  source 1..22: mol_type = other RNA
gggctcagctgacggccctcgg

SEQ ID NO: 6060 - RNA, 22 nt, synthetic construct
  source 1..22: mol_type = other RNA
gggctccggggtcttctctcgc

SEQ ID NO: 6061 - RNA, 22 nt, synthetic construct
  source 1..22: mol_type = other RNA
gggctgactccctctccctttc

SEQ ID NO: 6062 - RNA, 22 nt, synthetic construct
  source 1..22: mol_type = other RNA
ggggagctggatttccagtggc

SEQ ID NO: 6063 - RNA, 22 nt, synthetic construct
  source 1..22: mol_type = other RNA
ggggatgaggtgcccattccgc

SEQ ID NO: 6064 - RNA, 22 nt, synthetic construct
  source 1..22: mol_type = other RNA
ggggccaagagcagtgtccatc

SEQ ID NO: 6065 - RNA, 22 nt, synthetic construct
  source 1..22: mol_type = other RNA
ggggctcagctgacggccctcg

SEQ ID NO: 6066 - RNA, 22 nt, synthetic construct
  source 1..22: mol_type = other RNA
ggggctccggggtcttctctcg

SEQ ID NO: 6067 - RNA, 22 nt, synthetic construct
  source 1..22: mol_type = other RNA
ggggctgactccctctcccttt

SEQ ID NO: 6068 - RNA, 22 nt, synthetic construct
  source 1..22: mol_type = other RNA
gggggatgaggtgcccattccg

SEQ ID NO: 6069 - RNA, 22 nt, synthetic construct
  source 1..22: mol_type = other RNA
gggggctccggggtcttctctc

SEQ ID NO: 6070 - RNA, 22 nt, synthetic construct
  source 1..22: mol_type = other RNA
ggggggctccggggtcttctct

SEQ ID NO: 6071 - RNA, 22 nt, synthetic construct
  source 1..22: mol_type = other RNA
ggggtcctccttctttgaggag

SEQ ID NO: 6072 - RNA, 22 nt, synthetic construct
  source 1..22: mol_type = other RNA
ggggtcttctctcgccactgga

SEQ ID NO: 6073 - RNA, 22 nt, synthetic construct
  source 1..22: mol_type = other RNA
gggtcctccttctttgaggaga

SEQ ID NO: 6074 - RNA, 22 nt, synthetic construct
  source 1..22: mol_type = other RNA
gggtctgcagaacactggtggc

SEQ ID NO: 6075 - RNA, 22 nt, synthetic construct
  source 1..22: mol_type = other RNA
gggtcttctctcgccactggaa

SEQ ID NO: 6076 - RNA, 22 nt, synthetic construct
  source 1..22: mol_type = other RNA
ggtcagaggggccaagagcagt

SEQ ID NO: 6077 - RNA, 22 nt, synthetic construct
  source 1..22: mol_type = other RNA
ggtcctccttctttgaggagaa

SEQ ID NO: 6078 - RNA, 22 nt, synthetic construct
  source 1..22: mol_type = other RNA
ggtctgcagaacactggtggcc

SEQ ID NO: 6079 - RNA, 22 nt, synthetic construct
  source 1..22: mol_type = other RNA
ggtcttctctcgccactggaaa

SEQ ID NO: 6080 - RNA, 22 nt, synthetic construct
  source 1..22: mol_type = other RNA
ggtgcccattccgctaggaaag

SEQ ID NO: 6081 - RNA, 22 nt, synthetic construct
  source 1..22: mol_type = other RNA
ggtggcatactccgtctgctca

SEQ ID NO: 6082 - RNA, 22 nt, synthetic construct
  source 1..22: mol_type = other RNA
ggtggccaaggaagccggtcag

SEQ ID NO: 6083 - RNA, 22 nt, synthetic construct
  source 1..22: mol_type = other RNA
gtatgccaccattgtctttcct

SEQ ID NO: 6084 - RNA, 22 nt, synthetic construct
  source 1..22: mol_type = other RNA
gtcagaggggccaagagcagtg

SEQ ID NO: 6085 - RNA, 22 nt, synthetic construct
  source 1..22: mol_type = other RNA
gtcagctgagcccctgcgggcg

SEQ ID NO: 6086 - RNA, 22 nt, synthetic construct
  source 1..22: mol_type = other RNA
gtccacagagaacacaggcacg

SEQ ID NO: 6087 - RNA, 22 nt, synthetic construct
  source 1..22: mol_type = other RNA
gtccatcctcaggcctcagtgg

SEQ ID NO: 6088 - RNA, 22 nt, synthetic construct
  source 1..22: mol_type = other RNA
gtccctgagcagacggagtatg

SEQ ID NO: 6089 - RNA, 22 nt, synthetic construct
  source 1..22: mol_type = other RNA
gtcctccttctttgaggagaaa

SEQ ID NO: 6090 - RNA, 22 nt, synthetic construct
  source 1..22: mol_type = other RNA
gtctgcagaacactggtggcca

SEQ ID NO: 6091 - RNA, 22 nt, synthetic construct
  source 1..22: mol_type = other RNA
gtctgctcagggacacagggca

SEQ ID NO: 6092 - RNA, 22 nt, synthetic construct
  source 1..22: mol_type = other RNA
gtcttctctcgccactggaaat

SEQ ID NO: 6093 - RNA, 22 nt, synthetic construct
  source 1..22: mol_type = other RNA
gtctttcctagcggaatgggca

SEQ ID NO: 6094 - RNA, 22 nt, synthetic construct
  source 1..22: mol_type = other RNA
gtgcccagccactgaggcctga

SEQ ID NO: 6095 - RNA, 22 nt, synthetic construct
  source 1..22: mol_type = other RNA
gtgcccattccgctaggaaaga

SEQ ID NO: 6096 - RNA, 22 nt, synthetic construct
  source 1..22: mol_type = other RNA
gtgccctgtgtccctgagcaga

SEQ ID NO: 6097 - RNA, 22 nt, synthetic construct
  source 1..22: mol_type = other RNA
gtgcctgtgttctctgtggact

SEQ ID NO: 6098 - RNA, 22 nt, synthetic construct
  source 1..22: mol_type = other RNA
gtggactatggggagctggatt

SEQ ID NO: 6099 - RNA, 22 nt, synthetic construct
  source 1..22: mol_type = other RNA
gtggagggtctgcagaacactg

SEQ ID NO: 6100 - RNA, 22 nt, synthetic construct
  source 1..22: mol_type = other RNA
gtggcatactccgtctgctcag

SEQ ID NO: 6101 - RNA, 22 nt, synthetic construct
  source 1..22: mol_type = other RNA
gtggccaaggaagccggtcaga

SEQ ID NO: 6102 - RNA, 22 nt, synthetic construct
  source 1..22: mol_type = other RNA
gtggcgagagaagaccccggag

SEQ ID NO: 6103 - RNA, 22 nt, synthetic construct
  source 1..22: mol_type = other RNA
gtggctgggcactccgagggcc

SEQ ID NO: 6104 - RNA, 22 nt, synthetic construct
  source 1..22: mol_type = other RNA
gtggggctgactccctctccct

SEQ ID NO: 6105 - RNA, 22 nt, synthetic construct
  source 1..22: mol_type = other RNA
gtgtccatcctcaggcctcagt

SEQ ID NO: 6106 - RNA, 22 nt, synthetic construct
  source 1..22: mol_type = other RNA
gtgtccctgagcagacggagta

SEQ ID NO: 6107 - RNA, 22 nt, synthetic construct
  source 1..22: mol_type = other RNA
gtgttctctgtggactatgggg

SEQ ID NO: 6108 - RNA, 22 nt, synthetic construct
  source 1..22: mol_type = other RNA
gttctctgtggactatggggag

SEQ ID NO: 6109 - RNA, 22 nt, synthetic construct
  source 1..22: mol_type = other RNA
tactccgtctgctcagggacac

SEQ ID NO: 6110 - RNA, 22 nt, synthetic construct
  source 1..22: mol_type = other RNA
tagcggaatgggcacctcatcc

SEQ ID NO: 6111 - RNA, 22 nt, synthetic construct
  source 1..22: mol_type = other RNA
taggaaagacaatggtggcata

SEQ ID NO: 6112 - RNA, 22 nt, synthetic construct
  source 1..22: mol_type = other RNA
tagtccacagagaacacaggca

SEQ ID NO: 6113 - RNA, 22 nt, synthetic construct
  source 1..22: mol_type = other RNA
tatgccaccattgtctttccta

SEQ ID NO: 6114 - RNA, 22 nt, synthetic construct
  source 1..22: mol_type = other RNA
tatggggagctggatttccagt

SEQ ID NO: 6115 - RNA, 22 nt, synthetic construct
  source 1..22: mol_type = other RNA
tcaaagaaggaggacccctcag

SEQ ID NO: 6116 - RNA, 22 nt, synthetic construct
  source 1..22: mol_type = other RNA
tcagaggggccaagagcagtgt

SEQ ID NO: 6117 - RNA, 22 nt, synthetic construct
  source 1..22: mol_type = other RNA
tcagccgtgcctgtgttctctg

SEQ ID NO: 6118 - RNA, 22 nt, synthetic construct
  source 1..22: mol_type = other RNA
tcagctgacggccctcggagtg

SEQ ID NO: 6119 - RNA, 22 nt, synthetic construct
  source 1..22: mol_type = other RNA
tcagctgagcccctgcgggcgg

SEQ ID NO: 6120 - RNA, 22 nt, synthetic construct
  source 1..22: mol_type = other RNA
tcaggcctcagtggctgggcac

SEQ ID NO: 6121 - RNA, 22 nt, synthetic construct
  source 1..22: mol_type = other RNA
tcagggacacagggcacggggg

SEQ ID NO: 6122 - RNA, 22 nt, synthetic construct
  source 1..22: mol_type = other RNA
tcagtggctgggcactccgagg

SEQ ID NO: 6123 - RNA, 22 nt, synthetic construct
  source 1..22: mol_type = other RNA
tcatcccccgcccgcaggggct

SEQ ID NO: 6124 - RNA, 22 nt, synthetic construct
  source 1..22: mol_type = other RNA
tccacagagaacacaggcacgg

SEQ ID NO: 6125 - RNA, 22 nt, synthetic construct
  source 1..22: mol_type = other RNA
tccagctccccatagtccacag

SEQ ID NO: 6126 - RNA, 22 nt, synthetic construct
  source 1..22: mol_type = other RNA
tccagtggcgagagaagacccc

SEQ ID NO: 6127 - RNA, 22 nt, synthetic construct
  source 1..22: mol_type = other RNA
tccatcctcaggcctcagtggc

SEQ ID NO: 6128 - RNA, 22 nt, synthetic construct
  source 1..22: mol_type = other RNA
tccccatagtccacagagaaca

SEQ ID NO: 6129 - RNA, 22 nt, synthetic construct
  source 1..22: mol_type = other RNA
tccctctccctttctcctcaaa

SEQ ID NO: 6130 - RNA, 22 nt, synthetic construct
  source 1..22: mol_type = other RNA
tccctgagcagacggagtatgc

SEQ ID NO: 6131 - RNA, 22 nt, synthetic construct
  source 1..22: mol_type = other RNA
tccctttctcctcaaagaagga

SEQ ID NO: 6132 - RNA, 22 nt, synthetic construct
  source 1..22: mol_type = other RNA
tccgagggccgtcagctgagcc

SEQ ID NO: 6133 - RNA, 22 nt, synthetic construct
  source 1..22: mol_type = other RNA
tccgctaggaaagacaatggtg

SEQ ID NO: 6134 - RNA, 22 nt, synthetic construct
  source 1..22: mol_type = other RNA
tccggggtcttctctcgccact

SEQ ID NO: 6135 - RNA, 22 nt, synthetic construct
  source 1..22: mol_type = other RNA
tccgtctgctcagggacacagg

SEQ ID NO: 6136 - RNA, 22 nt, synthetic construct
  source 1..22: mol_type = other RNA
tcctagcggaatgggcacctca

SEQ ID NO: 6137 - RNA, 22 nt, synthetic construct
  source 1..22: mol_type = other RNA
tcctcaaagaaggaggacccct

SEQ ID NO: 6138 - RNA, 22 nt, synthetic construct
  source 1..22: mol_type = other RNA
tcctcaggcctcagtggctggg

SEQ ID NO: 6139 - RNA, 22 nt, synthetic construct
  source 1..22: mol_type = other RNA
tcctccttctttgaggagaaag

SEQ ID NO: 6140 - RNA, 22 nt, synthetic construct
  source 1..22: mol_type = other RNA
tccttctttgaggagaaaggga

SEQ ID NO: 6141 - RNA, 22 nt, synthetic construct
  source 1..22: mol_type = other RNA
tccttggccaccagtgttctgc

SEQ ID NO: 6142 - RNA, 22 nt, synthetic construct
  source 1..22: mol_type = other RNA
tcgccactggaaatccagctcc

SEQ ID NO: 6143 - RNA, 22 nt, synthetic construct
  source 1..22: mol_type = other RNA
tcggagtgcccagccactgagg

SEQ ID NO: 6144 - RNA, 22 nt, synthetic construct
  source 1..22: mol_type = other RNA
tctccctttctcctcaaagaag

SEQ ID NO: 6145 - RNA, 22 nt, synthetic construct
  source 1..22: mol_type = other RNA
tctcctcaaagaaggaggaccc

SEQ ID NO: 6146 - RNA, 22 nt, synthetic construct
  source 1..22: mol_type = other RNA
tctcgccactggaaatccagct

SEQ ID NO: 6147 - RNA, 22 nt, synthetic construct
  source 1..22: mol_type = other RNA
tctctcgccactggaaatccag

SEQ ID NO: 6148 - RNA, 22 nt, synthetic construct
  source 1..22: mol_type = other RNA
tctctgtggactatggggagct

SEQ ID NO: 6149 - RNA, 22 nt, synthetic construct
  source 1..22: mol_type = other RNA
tctgaccggcttccttggccac

SEQ ID NO: 6150 - RNA, 22 nt, synthetic construct
  source 1..22: mol_type = other RNA
tctgcagaacactggtggccaa

SEQ ID NO: 6151 - RNA, 22 nt, synthetic construct
  source 1..22: mol_type = other RNA
tctgctcagggacacagggcac

SEQ ID NO: 6152 - RNA, 22 nt, synthetic construct
  source 1..22: mol_type = other RNA
tctgtggactatggggagctgg

SEQ ID NO: 6153 - RNA, 22 nt, synthetic construct
  source 1..22: mol_type = other RNA
tcttctctcgccactggaaatc

SEQ ID NO: 6154 - RNA, 22 nt, synthetic construct
  source 1..22: mol_type = other RNA
tcttggcccctctgaccggctt

SEQ ID NO: 6155 - RNA, 22 nt, synthetic construct
  source 1..22: mol_type = other RNA
tctttcctagcggaatgggcac

SEQ ID NO: 6156 - RNA, 22 nt, synthetic construct
  source 1..22: mol_type = other RNA
tctttgaggagaaagggagagg

SEQ ID NO: 6157 - RNA, 22 nt, synthetic construct
  source 1..22: mol_type = other RNA
tgaccggcttccttggccacca

SEQ ID NO: 6158 - RNA, 22 nt, synthetic construct
  source 1..22: mol_type = other RNA
tgacggccctcggagtgcccag

SEQ ID NO: 6159 - RNA, 22 nt, synthetic construct
  source 1..22: mol_type = other RNA
tgactccctctccctttctcct

SEQ ID NO: 6160 - RNA, 22 nt, synthetic construct
  source 1..22: mol_type = other RNA
tgagcagacggagtatgccacc

SEQ ID NO: 6161 - RNA, 22 nt, synthetic construct
  source 1..22: mol_type = other RNA
tgagcccctgcgggcgggggat

SEQ ID NO: 6162 - RNA, 22 nt, synthetic construct
  source 1..22: mol_type = other RNA
tgaggagaaagggagagggagt

SEQ ID NO: 6163 - RNA, 22 nt, synthetic construct
  source 1..22: mol_type = other RNA
tgaggatggacactgctcttgg

SEQ ID NO: 6164 - RNA, 22 nt, synthetic construct
  source 1..22: mol_type = other RNA
tgaggcctgaggatggacactg

SEQ ID NO: 6165 - RNA, 22 nt, synthetic construct
  source 1..22: mol_type = other RNA
tgaggggtcctccttctttgag

SEQ ID NO: 6166 - RNA, 22 nt, synthetic construct
  source 1..22: mol_type = other RNA
tgaggtgcccattccgctagga

SEQ ID NO: 6167 - RNA, 22 nt, synthetic construct
  source 1..22: mol_type = other RNA
tgcagaacactggtggccaagg

SEQ ID NO: 6168 - RNA, 22 nt, synthetic construct
  source 1..22: mol_type = other RNA
tgccaccattgtctttcctagc

SEQ ID NO: 6169 - RNA, 22 nt, synthetic construct
  source 1..22: mol_type = other RNA
tgcccagccactgaggcctgag

SEQ ID NO: 6170 - RNA, 22 nt, synthetic construct
  source 1..22: mol_type = other RNA
tgcccattccgctaggaaagac

SEQ ID NO: 6171 - RNA, 22 nt, synthetic construct
  source 1..22: mol_type = other RNA
tgccctgtgtccctgagcagac

SEQ ID NO: 6172 - RNA, 22 nt, synthetic construct
  source 1..22: mol_type = other RNA
tgcctgtgttctctgtggacta

SEQ ID NO: 6173 - RNA, 22 nt, synthetic construct
  source 1..22: mol_type = other RNA
tgcgggcgggggatgaggtgcc

SEQ ID NO: 6174 - RNA, 22 nt, synthetic construct
  source 1..22: mol_type = other RNA
tgctcagggacacagggcacgg

SEQ ID NO: 6175 - RNA, 22 nt, synthetic construct
  source 1..22: mol_type = other RNA
tgctcttggcccctctgaccgg

SEQ ID NO: 6176 - RNA, 22 nt, synthetic construct
  source 1..22: mol_type = other RNA
tggaaatccagctccccatagt

SEQ ID NO: 6177 - RNA, 22 nt, synthetic construct
  source 1..22: mol_type = other RNA
tggacactgctcttggcccctc

SEQ ID NO: 6178 - RNA, 22 nt, synthetic construct
  source 1..22: mol_type = other RNA
tggactatggggagctggattt

SEQ ID NO: 6179 - RNA, 22 nt, synthetic construct
  source 1..22: mol_type = other RNA
tggagggtctgcagaacactgg

SEQ ID NO: 6180 - RNA, 22 nt, synthetic construct
  source 1..22: mol_type = other RNA
tggatttccagtggcgagagaa

SEQ ID NO: 6181 - RNA, 22 nt, synthetic construct
  source 1..22: mol_type = other RNA
tggcatactccgtctgctcagg

SEQ ID NO: 6182 - RNA, 22 nt, synthetic construct
  source 1..22: mol_type = other RNA
tggccaaggaagccggtcagag

SEQ ID NO: 6183 - RNA, 22 nt, synthetic construct
  source 1..22: mol_type = other RNA
tggcccctctgaccggcttcct

SEQ ID NO: 6184 - RNA, 22 nt, synthetic construct
  source 1..22: mol_type = other RNA
tggcgagagaagaccccggagc

SEQ ID NO: 6185 - RNA, 22 nt, synthetic construct
  source 1..22: mol_type = other RNA
tggctgggcactccgagggccg

SEQ ID NO: 6186 - RNA, 22 nt, synthetic construct
  source 1..22: mol_type = other RNA
tgggcacctcatcccccgcccg

SEQ ID NO: 6187 - RNA, 22 nt, synthetic construct
  source 1..22: mol_type = other RNA
tgggcactccgagggccgtcag

SEQ ID NO: 6188 - RNA, 22 nt, synthetic construct
  source 1..22: mol_type = other RNA
tggggagctggatttccagtgg

SEQ ID NO: 6189 - RNA, 22 nt, synthetic construct
  source 1..22: mol_type = other RNA
tggggctgactccctctccctt

SEQ ID NO: 6190 - RNA, 22 nt, synthetic construct
  source 1..22: mol_type = other RNA
tggtggcatactccgtctgctc

SEQ ID NO: 6191 - RNA, 22 nt, synthetic construct
  source 1..22: mol_type = other RNA
tggtggccaaggaagccggtca

SEQ ID NO: 6192 - RNA, 22 nt, synthetic construct
  source 1..22: mol_type = other RNA
tgtccatcctcaggcctcagtg

SEQ ID NO: 6193 - RNA, 22 nt, synthetic construct
  source 1..22: mol_type = other RNA
tgtccctgagcagacggagtat

SEQ ID NO: 6194 - RNA, 22 nt, synthetic construct
  source 1..22: mol_type = other RNA
tgtctttcctagcggaatgggc

SEQ ID NO: 6195 - RNA, 22 nt, synthetic construct
  source 1..22: mol_type = other RNA
tgtggactatggggagctggat

SEQ ID NO: 6196 - RNA, 22 nt, synthetic construct
  source 1..22: mol_type = other RNA
tgtgtccctgagcagacggagt

SEQ ID NO: 6197 - RNA, 22 nt, synthetic construct
  source 1..22: mol_type = other RNA
tgtgttctctgtggactatggg

SEQ ID NO: 6198 - RNA, 22 nt, synthetic construct
  source 1..22: mol_type = other RNA
tgttctctgtggactatgggga

SEQ ID NO: 6199 - RNA, 22 nt, synthetic construct
  source 1..22: mol_type = other RNA
ttccagtggcgagagaagaccc

SEQ ID NO: 6200 - RNA, 22 nt, synthetic construct
  source 1..22: mol_type = other RNA
ttccgctaggaaagacaatggt

SEQ ID NO: 6201 - RNA, 22 nt, synthetic construct
  source 1..22: mol_type = other RNA
ttcctagcggaatgggcacctc

SEQ ID NO: 6202 - RNA, 22 nt, synthetic construct
  source 1..22: mol_type = other RNA
ttccttggccaccagtgttctg

SEQ ID NO: 6203 - RNA, 22 nt, synthetic construct
  source 1..22: mol_type = other RNA
ttctcctcaaagaaggaggacc

SEQ ID NO: 6204 - RNA, 22 nt, synthetic construct
  source 1..22: mol_type = other RNA
ttctctcgccactggaaatcca

SEQ ID NO: 6205 - RNA, 22 nt, synthetic construct
  source 1..22: mol_type = other RNA
ttctctgtggactatggggagc

SEQ ID NO: 6206 - RNA, 22 nt, synthetic construct
  source 1..22: mol_type = other RNA
ttctttgaggagaaagggagag

SEQ ID NO: 6207 - RNA, 22 nt, synthetic construct
  source 1..22: mol_type = other RNA
ttgaggagaaagggagagggag

SEQ ID NO: 6208 - RNA, 22 nt, synthetic construct
  source 1..22: mol_type = other RNA
ttggccaccagtgttctgcaga

SEQ ID NO: 6209 - RNA, 22 nt, synthetic construct
  source 1..22: mol_type = other RNA
ttggcccctctgaccggcttcc

SEQ ID NO: 6210 - RNA, 22 nt, synthetic construct
  source 1..22: mol_type = other RNA
ttgtctttcctagcggaatggg

SEQ ID NO: 6211 - RNA, 22 nt, synthetic construct
  source 1..22: mol_type = other RNA
tttccagtggcgagagaagacc

SEQ ID NO: 6212 - RNA, 22 nt, synthetic construct
  source 1..22: mol_type = other RNA
tttcctagcggaatgggcacct

SEQ ID NO: 6213 - RNA, 22 nt, synthetic construct
  source 1..22: mol_type = other RNA
tttctcctcaaagaaggaggac

SEQ ID NO: 6214 - RNA, 22 nt, synthetic construct
  source 1..22: mol_type = other RNA
tttgaggagaaagggagaggga

SEQ ID NO: 6215 - RNA, 22 nt, synthetic construct
  source 1..22: mol_type = other RNA
gaggaccgcagccagcccggcc

SEQ ID NO: 6216 - RNA, 20 nt, synthetic construct
  source 1..20: mol_type = other RNA
aaaaaaatgtacttggttcc

SEQ ID NO: 6217 - RNA, 17 nt, synthetic construct
  source 1..17: mol_type = other RNA
aaaatgtacttggttcc

SEQ ID NO: 6218 - RNA, 17 nt, synthetic construct
  source 1..17: mol_type = other RNA
aaaaatgtacttggttc

SEQ ID NO: 6219 - RNA, 17 nt, synthetic construct
  source 1..17: mol_type = other RNA
aaaaaatgtacttggtt

SEQ ID NO: 6220 - RNA, 17 nt, synthetic construct
  source 1..17: mol_type = other RNA
aaaaaaatgtacttggt

SEQ ID NO: 6221 - protein, 1348 aa, synthetic construct
MSIKSDYFLGLDIGTDSIGWAVTDPEYHILRRKGKALWGIRLFDAANTAAERRTFRTSRRRIQRRRQRIRLLQELFAEEMVKLDPGFFQRLSDSAFWQEDKQEQQIYSLFTCENYTDVDYYREYPTIYHLRSALIQEKKEFDLRLLYLALHHLMKHRGHFLFNGSINNVTSFHTTFQTFADCLYDEFDIELECDSEDRFAEILKDKHARKTGKCSELEIICHIEKSNKQLKELFKLITGMKASLSVVFGDDELAEIEHNKISFSESSYDEVRLALEDEIQERTGILDIFHAVYSWAILADILEGGEYEGNSYLSVAKVSTYKKHGDDLRLLRTLVREYCPDHYKSFFSVSGKENYCAYAGTLKKNGKKQPIKRCSQEDFYKALKKLLNQMPTEQPEVKDIFIEIENGTFLPLQVSKDNGVIPYQVNKMELEKILQNAEEYLPFLKNIDEECGKTVSKKIIDLFEFRIPYYVGPLNTAKGENCWMVRKEAGRIYPWNFDEKVDRDQSAEKFIRRMTNQCTYLIHEDVVPKNSLLYSEFMVLNELNNVKIRSEKLPVELKQAIVLDLFKKQKQITGKKLLNYLNANGYDVKKEDLSGFDGNFKSSLSSYLTLKKVFGEELDKYSVQQMAEDIILWITLYGDDQKMLRRVIRKHYEQQLSEEQILSLSKLKFQGWGRLSRRLLSEMEGVDCETGECMTVMQGLRNTQNNLMQLLSQQFSFMELIEEENGNYYVDEITYDNLVKDMVISPSVKRAVWQTVQIVEEIKGVMGCQPKKIFVEMARSDEEKKRTVSRKDRLLEAYDAIKDEARQWQEELQKYSDGDFKAIKLYLYYTQMGQCMYTGRKIDLSQLNDATVWDRDHIYPQSKTKDDSLDNLVLVDRSVNAKKSDGMLSPEIQQRMRATWKYLKEKKLISEKKYERLTRVSPLTDEELAGFINRQLVETRQSSKAVATLLKRVYDEAEIVYVKAEAVSNFRRDNLDYIKVRDLNDYHHAKDAYQNIVVGNVFHEKFTSNPLRWLKNNPNTKYSLNQMFNFDLEKNGVVIWKRGKAGSIKCVEETLKRNDILFTRYAFCNKGGFFNQMLTAAPEDKTKAKGLVPIKKGMETWKYGGYTSVTPSHFMLVASKDKKGKEIRTIETVPLYRWKEFKENPDALLQYCREFYGLKEPKVLIPCIKKNARLVVNGFPMHLKGSTGKQLILQGAVQLCLNNENIKYLKKVTKYLEYNAQRRDKRTLLEVREVTGINKEENIQLYDVFVDKLSNTIYQYRPANPKDNLIKGREKFIELGLAEQCVVLGEVLHLFQCKPLTSDLTLIGGSPNTGTIKITKTISNCNVVKLLSQSIAGVKVREINLLII

SEQ ID NO: 6222 - DNA, 4047 bp, synthetic construct
  source 1..4047: mol_type = other DNA
atgagcataaaaagtgattattttttaggacttgatattggtacggattctattggatgggcggtaaccgacccagaatatcacatattgagacgaaaaggtaaagcattatggggaataagattatttgatgcggccaatacagcggcagaacggcgaacatttaggacaagccgaagaaggattcagagaagacgacagagaattcggttattgcaagaattatttgcagaagaaatggtaaaattagacccaggattttttcagaggttgtcagacagcgcattttggcaggaggataagcaagagcagcaaatttattcactttttacttgtgaaaattatacagatgttgattattacagagaatatcctactatttatcatttgagaagtgcattgattcaggaaaagaaggaatttgatcttcgtcttctatatcttgctcttcaccatttgatgaagcacaggggacatttcctgtttaatgggagtattaataatgtgacgtcatttcatacgacgtttcagacgtttgcagattgtctttatgatgagtttgatatagaactggaatgtgattccgaagatagatttgcagaaattttaaaggataaacatgccagaaaaacaggaaaatgttctgaattagagataatctgtcatatagaaaaatcaaataagcagctaaaagaactttttaaattaattacaggaatgaaagctagtttgagtgttgtgtttggtgatgatgagttagcggaaatagaacataataagattagtttttcagagagtagttatgatgaagtacgtcttgcattggaggatgagattcaggagaggactggtatactggatatctttcatgcagtttatagttgggcgattctcgcggatattttagaaggcggagaatatgaggggaattcttatctaagcgttgcgaaggtaagcacttataaaaagcatggtgatgatttgcggttgctaagaacactggttcgggaatattgtcctgatcattacaaatctttcttttccgtatcagggaaggagaattattgtgcatatgcgggtactttaaaaaagaatggaaaaaaacagccgattaaacgttgcagccaggaagatttttataaagcgttaaagaaattgctgaatcagatgccgacagaacaaccagaagtgaaagacatcttcatcgaaattgaaaatggtacttttttgccgttgcaggtaagtaaggataatggagtgataccttatcaggtaaataagatggaattagaaaaaatcctgcagaatgcagaggaatatttgccatttctaaaaaatatagatgaagaatgtggaaaaacggttagtaagaagattatagatctctttgagtttagaataccatattatgtagggccgcttaataccgctaaaggagaaaactgttggatggtcagaaaagaagcggggagaatatatccgtggaattttgatgaaaaggtagacagagatcaatcagcagaaaaatttatccgtagaatgacgaatcagtgtacatatttaatacatgaggatgttgtacctaaaaattctttgctttattcggagtttatggtgcttaatgaattaaataatgtaaagatccggtctgagaagctgccggtggagttaaaacaggcaatagtattggatttgtttaagaaacaaaagcagataacaggaaaaaaacttcttaattacttgaatgcaaatggatatgatgtaaaaaaagaagatttgtcagggtttgacggaaactttaaatcatctctgtcatcatatcttactttgaaaaaagtatttggtgaagaattagataaatatagtgtgcagcagatggcagaggatattatcttgtggatcactctgtatggagatgatcagaagatgttgcgcagggtaattcgaaaacattatgaacagcaattgagtgaagaacagattctttccttatcgaaattgaaattccaaggctggggaagattatccagacgacttttgagtgaaatggaaggcgttgattgtgagactggtgagtgtatgacggtcatgcaaggacttcgtaatactcagaataatctgatgcagcttctaagtcagcagttttcatttatggaattgattgaggaagaaaatgggaattattatgtagatgagattacatacgataatcttgtgaaagatatggttatatctccgtcagtgaagagagcagtctggcagacagttcagattgtggaggagattaagggggtaatgggctgtcagcctaagaagatatttgtcgagatggcgcgaagcgatgaagagaaaaagcgtactgtatctaggaaagacaggttattagaagcatatgatgcgatcaaggatgaggctcgtcaatggcaggaagagttgcaaaagtattcagatggtgattttaaggctattaaactttatctgtattatacgcagatggggcaatgtatgtatactggaagaaagatagatctgtcacaattaaatgatgcgacggtatgggacagagatcatatatatccacagtccaaaacaaaagatgatagtctggataatctggtattggtagaccggagcgtgaacgctaagaaaagtgatgggatgctatcacctgagattcagcagagaatgcgggctacttggaaatacttaaaagagaaaaagttgatttcagagaagaaatatgagcgtttgactagggtctcaccacttacagatgaggaattggcaggttttattaatcgacagttagttgaaacacgtcagtcttcgaaagcagtagcaacacttttgaaacgagtatatgatgaagcggagattgtctatgtaaaagcggaagctgtttcaaattttagaagagataatttggattatattaaggtgcgtgatctgaatgattatcatcatgctaaagatgcatatcagaatattgtagtggggaatgtttttcatgagaaatttaccagcaatccgcttcgttggctgaaaaacaatcctaatacgaaatatagtttaaatcagatgtttaactttgatttagagaaaaatggggtggtaatatggaaaagggggaaggctggaagtattaaatgtgttgaagaaacattgaaaagaaatgatattctttttacacgatatgctttttgtaataaaggtggtttttttaaccagatgttaacggcagctccagaagataaaacgaaagcaaagggacttgtaccaataaaaaaaggtatggaaacatggaaatacgggggatatacatcagtaactccgtcacattttatgttggttgcttcgaaagataagaaaggaaaggagataagaacgattgagacagttccgttgtataggtggaaagagttcaaagaaaatccagatgcattactccaatattgtagagagttctatggtttgaaagagcccaaggtgttgataccatgcatcaagaagaatgccagattagtcgttaatggatttccaatgcatttgaaagggagtacaggaaaacaattgattttgcagggagcggttcaattatgtctgaataatgaaaatataaagtatttgaaaaaagtcacaaaatatttggaatataatgcacagagaagagataaaagaacactgctggaagtaagagaggttacaggaattaacaaagaggaaaatatacagttatatgatgtgtttgttgataaattgagtaacacaatatatcagtatcgtccggccaatccaaaggacaatcttataaaaggaagagagaagtttatagaattagggttggcagaacaatgtgttgtgttaggtgaagtattgcatttgttccaatgtaaaccactcacgtctgatttgactttgattggaggttcaccgaatacagggacaataaaaataacaaagacaattagtaattgtaatgttgtaaagttgttaagccaatctattgcaggtgttaaagtgagagaaattaatttgttaataatatga

SEQ ID NO: 6223 - DNA, 4044 bp, synthetic construct
  source 1..4044: mol_type = other DNA
tctatcaagagcgactacttcctgggcctcgacatcggcacagattctatcggatgggccgtgacagaccccgagtaccacatcctgagaagaaagggcaaagccctgtggggcatcagactgttcgatgccgccaatactgccgccgagagaagaaccttccggaccagcagaagaagaatccagcggcggagacagcggatcagactgctgcaagagctgttcgccgaggaaatggttaagctggaccccggcttcttccagagactgagcgatagcgccttctggcaagaggacaagcaagagcagcagatctacagcctgtttacctgcgagaactacaccgacgtggactactacagagagtaccccaccatctaccacctgagaagcgccctgatccaagagaaaaaagagttcgacctgcggctgctgtatctggccctgcaccatctgatgaagcaccggggccactttctgttcaacggcagcatcaacaacgtgaccagcttccacaccaccttccagaccttcgccgactgcctgtacgacgagttcgacatcgagctggaatgcgacagcgaggacagattcgccgagatcctgaaggataagcacgccagaaagaccggcaagtgctctgagctggaaatcatctgccacatcgagaagtccaacaagcagctgaaagaactgttcaagctgatcaccggcatgaaggccagcctgagcgtggtgtttggagatgatgagctggccgagatcgagcacaacaagatcagcttcagcgagagcagctacgacgaagtgcggctggccctggaagatgagattcaagagagaaccggcatcctggacatcttccacgccgtgtattcttgggccatcctggccgatattctggaaggcggcgagtacgagggcaacagctatctgtctgtggccaaggtgtccacctacaagaagcacggcgacgacctgagactgctgagaacactcgtgcgcgagtactgccccgaccactacaagagctttttcagcgtgtccggcaaagagaactactgcgcctacgccggcacactgaagaagaacggcaagaagcagcccatcaagcggtgcagccaagaggacttctacaaggccctgaagaaactgctgaaccagatgcctaccgagcagcccgaagtgaaggatatcttcatcgagattgagaacggcaccttcctgcctctgcaagtgtccaaggacaacggcgtgatcccctaccaagtgaacaagatggaactcgagaagatcctgcagaacgccgaagagtacctgcctttcctgaagaacatcgacgaggaatgcggcaagaccgtgtccaagaagatcatcgacctgttcgagttcagaatcccctactacgtgggccctctgaataccgccaagggcgagaattgctggatggttcgaaaagaggccggcagaatctacccctggaacttcgatgagaaggtggacagagatcagagcgccgagaagttcatcagacggatgaccaaccagtgcacctacctgatccacgaggacgtggtgcctaagaacagcctgctgtactccgagttcatggtgctgaacgagctgaacaatgtgaagattcggagcgagaagctgcccgtggaactgaagcaggccatcgtgctggacctgtttaagaagcagaagcagatcacagggaagaagctgctcaactacctgaacgccaacggctacgacgtgaagaaagaggacctgagcggcttcgacggcaacttcaagtccagcctgtccagctacctgactctgaagaaggtgttcggagaggaactggacaagtacagcgtgcagcagatggccgaggacatcatcctgtggatcaccctgtatggcgacgatcagaaaatgctgcggagagtgatccggaagcactacgagcagcagctgtctgaggaacagatcctgagcctgagcaagctgaagttccaaggctggggcagactgtctagacggctgctctctgaaatggaaggcgtggactgtgaaaccggcgagtgcatgacagtgatgcagggcctgagaaacacccagaacaacctgatgcagctgctgagccagcagttcagcttcatggaactgatcgaggaagagaacgggaactactacgtcgacgagatcacctacgacaacctggtcaaggacatggtcatcagccctagcgtgaaaagggccgtgtggcagacagtgcagatcgtggaagaaatcaagggcgtgatgggatgccagcctaagaaaatcttcgtggaaatggcccgcagcgacgaagagaagaaacggaccgtgtctcggaaggatcggctgctggaagcctacgacgccatcaaggatgaggcccggcaatggcaagaagaactgcagaaatactccgacggcgatttcaaggccatcaagctgtacctgtactacacccagatgggccagtgcatgtacaccggcagaaaaatcgatctgtcccagctgaacgacgccaccgtgtgggatagagatcacatctaccctcagagcaagaccaaggacgacagcctggacaatctggtgctggtggatagatccgtgaatgccaagaaaagcgacggcatgctgagccccgagatccagcagagaatgagagccacctggaagtacctgaaagaaaagaagctcatcagcgagaagaagtacgagcggctgaccagagtgtcccctctgacagatgaagaactggccggcttcatcaaccggcagctggtggaaacaagacagagcagcaaagccgtggccacactgctgaagagggtgtacgatgaggccgagattgtgtatgtgaaggccgaggccgtgtctaacttccggcgggataacctggactacatcaaagtgcgggacctgaacgactaccaccacgccaaggacgcctaccagaacatcgtcgtgggcaacgtgttccacgagaagtttaccagcaatcccctgcggtggctgaaaaacaaccccaacaccaagtactccctcaaccagatgttcaacttcgacctggaaaagaacggcgtggtcatctggaagagaggcaaggccggctccattaagtgtgtggaagagacactgaagcggaacgacatcctgttcaccagatacgctttctgcaacaaaggcggcttctttaatcagatgctgaccgccgctccagaggataagacaaaggccaaaggcctggtgcctatcaagaaaggcatggaaacctggaaatacggcggctacaccagcgtgacccctagccactttatgctggtggccagcaaggacaagaagggaaaagagatccggaccatcgagacagtgcccctgtaccggtggaaagagttcaaagagaatcccgacgctctgctccagtactgcagagagttctacggcctgaaagagcccaaggttctgatcccttgcatcaagaagaatgcccggctggtcgtgaacggcttccctatgcacctgaagggcagcaccggaaaacagctgattctgcagggtgccgtgcagctgtgcctgaacaacgagaacatcaagtacctcaagaaagtgacgaagtacctcgagtacaacgcccagcggagagacaagagaaccctgctcgaagttcgggaagtgaccggaatcaacaaagaggaaaacatccagctgtacgatgtgttcgtggacaagctgagcaacacaatctaccagtacagacccgccaatcctaaggacaacctcatcaagggccgcgagaaattcatcgagcttggcctggctgagcagtgcgtggtgctgggagaagtgctgcatctgttccagtgcaagcccctgaccagcgatctgacactgatcggcggaagccctaacaccggcaccatcaagatcaccaagaccatcagcaactgcaacgtggtcaagctgctgtcccagtctatcgccggcgtgaaagtccgcgagatcaacctgctgatcatctga

SEQ ID NO: 6224 - RNA, 107 nt, synthetic construct
  source 1..107: mol_type = other RNA
gtttgagagtagtgtaagaaattacactacaagttcaaataaaaatttattcaaatccatttgctacattgtgtagaatttaaagatctggcaacagatcttttttt

1. A method for inactivating alleles of the Programmed cell death protein 1 (PDCD1) gene in a cell, the method comprising
introducing to the cell a composition comprising:
at least one CRISPR nuclease, or a polynucleotide molecule encoding a CRISPR nuclease; and
an RNA molecule comprising a guide sequence portion, or a polynucleotide molecule encoding the RNA molecule,
wherein a complex of the CRISPR nuclease and the RNA molecule affects a double strand break in alleles of the PDCD1 gene, and
wherein the guide sequence portion of the RNA molecule comprises 17-50 contiguous nucleotides containing nucleotides in the sequence set forth in any one of SEQ ID NOs: 1-6220.

2. (canceled)

3. The method of claim 1, wherein the cell is a lymphocyte, a T cell, a T regulatory cell, a B cell, a natural killer (NK) cell, a macrophage, a stem cell, or a fibroblast, blood cell, hepatocyte, keratinocyte, or any other cell type capable of being reprogrammed to an induced pluripotent stem cell (iPSC), or
wherein the cell is a hematopoietic stem cell (HSC), induced pluripotent stem cell (iPS cell), iPSc-derived cell, natural killer cell (NK), iPS-derived NK cell (iNK), T cell, innate-like T cell (iT), natural killer T cell (NKT), γδ T cell, iPSc-derived T cell, invariant NKT cells (iNKT), iPSc-derived NKT, monocyte, or macrophage.

4. (canceled)

5. (canceled)

6. The method of claim 1, wherein alleles of the PDCD1 gene in the cell are subjected to an insertion or deletion mutation.

7. (canceled)

8. (canceled)

9. The method of claim 1, wherein the composition introduced to the cell further comprises a second RNA molecule comprising a guide sequence portion, wherein the guide sequence portion of the second RNA molecule comprises 17-50 contiguous nucleotides containing nucleotides in the sequence set forth in any one of SEQ ID NOs: 1-6220, wherein the guide sequence portion of the second RNA molecule differs from the guide sequence portion of the first RNA molecule.

10. A method for inactivating alleles of the Programmed cell death protein 1 (PDCD1) gene in a cell, the method comprising
introducing to the cell a composition comprising:
at least one CRISPR nuclease, or a polynucleotide molecule encoding a CRISPR nuclease; and
an RNA molecule comprising a guide sequence portion, or a polynucleotide molecule encoding the RNA molecule,
wherein a complex of the CRISPR nuclease and the RNA molecule affects a double strand break in alleles of the PDCD1 gene, and
wherein the guide sequence portion of the RNA molecule comprises 17-50 contiguous nucleotides containing nucleotides in the sequence set forth in any one of SEQ ID NOs: 1-6220 modified to contain 1, 2, 3, 4, or 5 nucleotide mismatches relative to a fully-complementary target sequence of the guide sequence portion.

11. (canceled)

12. The method of claim 10, wherein the guide sequence portion provides higher targeting specificity to the complex of the CRISPR nuclease and the RNA molecule relative to a guide sequence portion that has higher complementarity to an allele of the PDCD1 gene.

13. The method of claim 10, wherein the composition introduced to the cell further comprises a second RNA molecule comprising a guide sequence portion, wherein the guide sequence portion of the RNA molecule comprises 17-50 contiguous nucleotides containing nucleotides in the sequence set forth in any one of SEQ ID NOs: 1-1-6220, or any one of SEQ ID NOs: 1-1-6220 modified to contain 1, 2, 3, 4, or 5 nucleotide mismatches relative to a fully-complementary target sequence of the guide sequence portion, wherein the guide sequence portion of the second RNA molecule differs from the guide sequence portion of the first RNA molecule.

14. A composition comprising:
at least one CRISPR nuclease, or a polynucleotide molecule encoding a CRISPR nuclease; and
an RNA molecule comprising a guide sequence portion, or a polynucleotide molecule encoding the RNA molecule,
wherein the guide sequence portion of the RNA molecule comprises 17-50 contiguous nucleotides containing nucleotides in the sequence set forth in any one of SEQ ID NOs: 1-6220 or in any one of SEQ ID NOs: 1-6220, modified to contain 1, 2, 3, 4, or 5 nucleotide mismatches relative to a fully target sequence of the guide sequence portion.

15. The composition of claim 14, further comprising a second RNA molecule which comprises a guide sequence portion comprising 17-50 contiguous nucleotides containing nucleotides in the sequence set forth in any one of SEQ ID NOs: 1-6220, or any one of SEQ ID NOs: 1-6220 modified to contain 1, 2, 3, 4, or 5 nucleotide mismatches relative to a fully-complementary target sequence of the guide sequence portion, wherein the guide sequence portion of the second RNA molecule differs from the guide sequence portion of the first RNA molecule.

16. (canceled)

17. (canceled)

18. (canceled)

19. (canceled)

20. A cell modified using the composition of claim 14.

21. (canceled)

22. (canceled)

23. The modified cell of claim 20, wherein the cell is a stem cell or any cell type capable of being reprogrammed to an induced pluripotent stem cell (iPSC).

24. (canceled)

25. (canceled)

26. (canceled)

27. Use of the composition of claim 14 for adoptive immunotherapy, comprising delivering the composition of claim 14, or a cell modified by the composition of claim 14, to a subject in need of adoptive immunotherapy.

28. (canceled)

29. (canceled)

30. (canceled)

31. (canceled)

32. (canceled)

33. A method of treating cancer, the method comprising delivering the composition of claim 14, or a cell modified by the composition of claim 14, to a subject in need of cancer treatment.

34. (canceled)

35. The method of claim 1, wherein the guide sequence portion of the RNA molecule further comprises 17-50 contiguous nucleotides containing nucleotides in the sequence set forth in any one of SEQ ID NOs: 2226, 2573, 2757, 2887, or 6215.

36. The method of claim 35, wherein at least one CRISPR nuclease is OMNI-103.

37. The method of claim 10, wherein the guide sequence portion of the RNA molecule further comprises 17-50 contiguous nucleotides containing nucleotides in the sequence set forth in any one of SEQ ID NOs: 2226, 2573, 2757, 2887, or 6215.

38. The method of claim 37, wherein at least one CRISPR nuclease is OMNI-103.

39. The composition of claim 14, wherein the guide sequence portion of the RNA molecule further comprises 17-50 contiguous nucleotides containing nucleotides in the sequence set forth in any one of SEQ ID NOs: SEQ ID NOs: 2226, 2573, 2757, 2887, or 6215.

40. The composition of claim 39, wherein at least one CRISPR nuclease is OMNI-103.
